(19) United States
(12) Patent Application Publication
(10) Pub. No.: US 2023/0125976 A1
(43) Pub. Date: Apr. 27, 2023

(54) MICROBIAL CONSORTIA FOR THE TREATMENT OF DISEASE

(71) Applicant: Federation Bio Inc., South San Francisco, CA (US)

(72) Inventors: Lee Swem, South San Francisco, CA (US); Dante Ricci, Richmond, CA (US); Ariel R. Brumbaugh, Redwood City, CA (US); John Cremin, South San Francisco, CA (US); Joshua J. Hamilton, South San Francisco, CA (US); Shital Tripathi, South San Francisco, CA (US); Lauren Wong, South San Francisco, CA (US); Heather Romasko, South San Francisco, CA (US); Racquel Bracken, South San Francisco, CA (US); Emily Drabant Conley, South San Francisco, CA (US); Anthony Rush, Oakland, CA (US)

(21) Appl. No.: 17/906,060

(22) PCT Filed: Mar. 10, 2021
(86) PCT No.: PCT/US2021/021790

§ 371 Date: Sep. 9, 2022

Related U.S. Application Data
(60) Provisional application No. 62/987,757, filed on Mar. 10, 2020.

(51) Int. Cl. A61K 35/741; A61P 3/00

(52) U.S. Cl. CPC A61K 35/741; A61P 3/00

(57) ABSTRACT

The present invention provides microbial consortia capable of stable engraftment in the gastrointestinal tract of a subject, and degradation of a disease-associated metabolic substrate, and methods of using the same.

### CROSS-REFERENCE TO RELATED APPLICATIONS

[0001] This application claims the benefit of and priority to U.S. Provisional Patent Application No. 62/987,757, filed Mar. 10, 2020, the disclosure of which is hereby incorporated by reference in its entirety for all purposes.

### SEQUENCE LISTING

[0002] The instant application contains a Sequence Listing which has been submitted electronically in ASCII format and is hereby incorporated by reference in its entirety. Said ASCII copy, created on Mar. 10, 2021, is named FBI-002WO_SL.txt and is 878,406 bytes in size.

### FIELD OF THE INVENTION

[0003] The invention generally relates to microbial consortia for administration to an animal for degradation of a disease-associated metabolic substrate.

### BACKGROUND

[0004] The gastrointestinal tract comprises various biological niches along its longitudinal length having different physical, chemical, and nutrient compositions. As a consequence of these diverse conditions, specific microbial communities are established within a particular biological niche. The microbial species comprising a specific microbial community are highly responsive to their local environment and produce an array of bioactive molecules that facilitate host engraftment, inter-microbial communication, nutrient metabolism, and inclusion or exclusion of competing microbial species. Adding further complexity, there is substantial diversity of microbial species and strains in the human GI tract between individuals, which is attributed to a number of factors including genetics, diet, antibiotic and antifungal use, surgical intervention (e.g., gastric by-pass/bowel resection), presence of inflammatory bowel disease and/or irritable bowel syndrome, and other environmental influences. However, despite this interindividual diversity, the functional attributes of the varying human gut microbiota are relatively consistent among healthy adults and comprise core metabolic pathways involved in carbohydrate metabolism, amino acid metabolism, fermentation, and oxidative phosphorylation.

[0005] Modulation of microbial species in the GI tract through the use of antibiotics, antifungals, and more recently, fecal microbial transplantation (“FMT”), have been approaches clinically investigated for the treatment and/or prevention of certain diseases and disorders. For example, Dodd et al. (Nature, 2007, 551: 648-652) have proposed FMT as a therapeutic to modulate the levels of aromatic amino acid metabolites in the serum of gnotobiotic mice, which affect intestinal permeability and systemic immunity. In further examples, administration of bacterial compositions has also been proposed as a method for treating Clostridium difficile infection, ulcerative colitis, cholestatic disease, and hyperoxaluria (see e.g., US 2018/0353554, WO 2019/036510, U.S. RE39,585).

[0006] As a modality for treating various diseases and/or conditions, there is a need for microbial compositions comprising a plurality of microbial species having improved therapeutic efficacy and an ability to efficiently engraft in a host, grow, and metabolize pathogenic substrates to non-pathogenic metabolic products within the various biological niches of the GI tract and within the diverse GI environments of different individuals.

### SUMMARY OF THE INVENTION

[0007] Disclosed here is a microbial consortium for administration to an animal comprising a plurality of active microbes and an effective amount of a supportive community of microbes. In some embodiments, the plurality of active microbes metabolize a first metabolic substrate to produce one or more than one metabolite, wherein the first metabolic substrate causes or contributes to disease in an animal.

[0008] In some embodiments, the supportive community of microbes comprises between 1 and 300 microbial strains and meets one, two, three, or four of the following conditions:
[0009] 1) the supportive community of microbes metabolizes one or more than one metabolite produced by the plurality of active microbes, wherein the one or more than one metabolite inhibits metabolism of the first metabolic substrate by one or more of the plurality of active microbes,
[0010] 2) the supportive community of microbes increases the flux of a precursor of the first metabolic substrate into a biochemical pathway that converts said precursor into a metabolite that is not the first metabolic substrate,
[0011] 3) the supportive community of microbes enhances one or more than one characteristic of the plurality of active microbes when administered to an animal selected from the group consisting of: a) gastrointestinal engraftment, b) biomass, c) first metabolic substrate metabolism, and d) longitudinal stability as compared to administration of the plurality of active microbes in the absence of the supportive community of microbes, and
[0012] 4) the supportive community of microbes catalyzes one or more than one reaction selected from the group consisting of: fermentation of polysaccharides to one or more than one of the group consisting of acetate, acetoin, 2-oxoglutarate, propionate, 1,3-propanediol, succinate, ethanol, lactate, butyrate, 2,3-butanediol, acetone, butanol, formate, H₂, and CO₂, fermentation of amino acids to one or more than one of the group consisting of acetate, propionate, butanoate, butyrate, isobutyrate, 2-methylbutyrate, isovalerate, isocaproate, 3-phenylpropanoate, phloretate, 3-(1H-indol-3-yl)propanoate, 5-aminopentanoate, H₂, H₂S, and CO₂, synthesis of one or more than one of the group consisting of methane from H₂ and CO₂, methane from formate and H₂, acetate from H₂ and CO₂, acetate from formate and H₂, acetate and sulfide from H₂, CO₂, and sulfate, propionate and CO₂ from succinate, succinate from H₂ and fumarate; synthesis of succinate from formate and fumarate, and butyrate, acetate, H₂, and CO₂ from lactate, deconjugation of conjugated bile acids to produce primary bile acids, conversion of cholic acid (CA) to 7-oxocholic acid, conversion of 7-oxocholic acid to 7-beta-cholic acid (7betaCA), conversion of chenodeoxycholic acid (CDCA) to 7-oxochenodeoxycholic acid, and conversion of 7-oxochenodeoxycholic acid to ursodeoxycholic acid (UDCA).

[0013] In some embodiments, the first metabolic substrate metabolizing activity of at least one of the plurality of active microbes is significantly different when measured in a standardized substrate metabolization assay at two pH values within a range of 4 to 8, and wherein the difference between the two pH values is at least one pH unit.

[0014] In some embodiments, the first metabolic substrate metabolizing activity of at least one of the plurality of active microbes is significantly different when measured in a standardized substrate metabolization assay at two first metabolic substrate concentrations within a 100 fold range, and wherein the difference between the two first metabolic substrate concentrations is at least 1.2-fold.

[0015] In some embodiments, the supportive community of microbes comprises at least three, at least four, at least five, or six phyla selected from Bacteroidetes, Firmicutes, Actinobacteria, Proteobacteria, Verrucomicrobia, and Euryarchaeota.

[0016] In some embodiments, the supportive community of microbes comprises one or more of the subclades Bacteroidales, Clostridiales, Erysipelotrichales. Negativicutes, Coriobacteriia, Bifidobacteriales, or Methanobacteriales.

[0017] In some embodiments, the first metabolic substrate is oxalate. In some embodiments, the supportive community of microbes catalyzes synthesis of methane from formate and H₂.

[0018] In some embodiments, the plurality of active microbes comprises Oxalobacter formigenes. In some embodiments the supportive community of microbes comprises a Bacteroidetes and a Euryarchaeota. In some embodiments, the supportive community of microbes comprises a Bateroides and Methanobrevibacter. In further embodiments, the supportive community of microbes comprises Bacteroides thetaiotaomicron and/or Bacteroides vulgatus, and Methanobrevibacter smithii.

[0019] In some embodiments, the supportive community of microbes metabolizes one or more than one metabolite produced by the plurality of active microbes, wherein the one or more than one metabolite inhibits metabolism of the plurality of active microbes.

[0020] In some embodiments, the supportive community of microbes enhances one or more than one characteristic of the plurality of active microbes when administered to an animal selected from the group consisting of gastrointestinal engraftment, biomass, first metabolic substrate metabolism, and longitudinal stability as compared to administration of the plurality of active microbes in the absence of the supportive community of microbes.

[0021] In some embodiments, the supportive community catalyzes one or more than one reaction selected from the group consisting of:
[0022] fermentation of polysaccharides to one or more than one of the group consisting of acetate, acetoin, 2-oxoglutarate, propionate, 1,3-propanediol, succinate, ethanol, lactate, butyrate, 2,3-butanediol, acetone, butanol, formate, H₂, and CO₂,
[0023] fermentation of amino acids to one or more than one of the group consisting of acetate, propionate, butanoate, butyrate, isobutyrate, 2-methylbutyrate, isovalerate, isocaproate, 3-phenylpropanoate, phloretate, 3-(1H-indol-3-yl)propanoate, 5-aminopentanoate, H₂, H₂S, and CO₂, synthesis of one or more than one of the group consisting of methane from H₂ and CO₂, methane from formate and H₂, acetate from H₂ and CO₂, acetate from formate and H₂, acetate and sulfide from H₂, CO₂, and sulfate, propionate and CO₂ from succinate, succinate from H₂ and fumarate; synthesis of succinate from formate and fumarate, and butyrate, acetate, H₂, and CO₂ from lactate, and
[0024] deconjugation of conjugated bile acids to produce primary bile acids, conversion of cholic acid (CA) to 7-oxocholic acid, conversion of 7-oxocholic acid to 7-beta-cholic acid (7betaCA), conversion of chenodeoxycholic acid (CDCA) to 7-oxochenodeoxycholic acid, and conversion of 7-oxochenodeoxycholic acid to ursodeoxycholic acid (UDCA).

[0025] In some embodiments, the supportive community of microbes comprises between 20 and 200 microbial strains. In some embodiments, the supportive community comprises at least 4 phyla selected from the group consisting of Bacteroidetes, Firmicutes, Actinobacteria, and Proteobacteria. In some embodiments, the supportive community comprises a Ruminococcus, Clostridium, Bacteroides, Neglecta, Bifidobacterium, Egerthella, Clostridiaceae, Parabacteroides, Bilophila, Dorea, Collinsella, and Faecalibacterium.

[0026] In some embodiments, the supportive community comprises Ruminococcus bromii, Clostridium citroniae, Bacteroides salyersiae, Neglecta timonensis, Bifidobacterium longum, Bifidobacterium pseudocatenulatum, Bacteroides thetaiotaomicron, Eggerthella lenta, Clostridiaceae sp., Bifidobacterium dentium, Parabacteroides merdae, Bilophila wadsworthia, Bacteroides caccae, Dorea longicatena, Collinsella aerofaciens, Clostridium scindens, Faecalibacterium prausnitzii, Clostridium symbiosum, and Bacteroides vulgatus.

[0027] In some embodiments, the supportive community comprises an Acidaminococcus, an Akkermansia, an Alistipes, an Anaerofustis, an Anaerostipes, an Anaerotruncus, a Bacteroides, a Barnesiella, a Bifidobacterium, a Bilophila, a Blautia, a Butyricimonas, a Catabacter hongkongensis, a Clostridiaceae, a Clostridiales, a Clostridium, a Collinsella, a Coprococcus, a Dialister, a Dielma, a Dorea, an Eggerthella, an Eisenbergiella, a Eubacterium, a Faecalibacterium, a Fusicatenibacter saccharivorans, a Gordonibacter pamelaeae, a Holdemanella, a Hungatella, a Lachnoclostridium, Lachnospiraceae, a Lactobacillus, a Longicatena, a Megasphaera, a Methanobrevibacter, a Monoglobus, a Neglecta, a Parabacteroides, a Paraprevotella, a Parasutterella, a Phascolarctobacterium, a Porphyromonas, a Roseburia hominis, a Ruminococcaceae, a Ruminococcus, a Ruthenibacterium, a Senegalimassilia, a Sutterella, and a Turicibacter.

[0028] In some embodiments, the supportive community comprises or consists of Acidaminococcus intestine, Akkermansia mucimphila, Alistipes onderdonkii, Alistipes putredinis, Alistipes senegalensis, Alistipes shahii, Alistipes sp., Alistipes timonensis, Anaerofustis stercorihominis, Anaerostipes hadrus, Anaerotruncus massiliensis, Bacteroides caccae, Bacteroides coprocola, Bacteroides faecis, Bacteroides finegoldii, Bacteroides fragilis, Bacteroides kribbi, Bacteroides massiliensis, Bacteroides nordii, Bacteroides ovatus, Bacteroides salyersiae, Bacteroides stercorirosoris, Bacteroides stercoris, Bacteroides thetaiotaomicron, Bacteroides uniformis, Bacteroides vulgatus, Bacteroides xylanisolvens, Barnesiella intestinihominis, Bifidobacterium adolescentis, Bifidobacterium bifidum, Bifidobacterium catenulatum, Bifidobacterium dentium, Bifidobacterium longum, Bifidobacterium pseudocatenulatum, Bilophila wadsworthia, Blautia faecis, Blautia hydrogenotrophica, Blautia massiliensis, Blautia obeum, Blautia wexlerae, Butyricimonas faecihominis, Catabacter hongkongensis, Clostridiaceae sp., Clostridiales sp., Clostridium aldenense, Clostridium bolteae, Clostridium citroniae, Clostridium clostridioforme, Clostridium fessum, Clostridium scindens, Collinsella aerofaciens, Coprococcus comes, Coprococcus eutactus, Dialister invisus, Dialister succinatiphilus, Dielma fastidiosa, Dorea formicigenerans, Dorea longicatena, Eggerthella lenta, Eisenbergiella tayi, Eubacterium eligens, Eubacterium hallii, Eubacterium rectale, Eubacterium siraeum, Eubacterium ventriosum, Eubacterium xylanophilum, Faecalibacterium prausnitzii, Fusicatenibacter saccharivorans, Gordonibacter pamelaeae, Holdemanella biformis, Hungatella effluvia, Lachnoclostridium pacaense, Lachnospiraceae sp., Lactobacillus rogosae, Longicatena caecimuris, Megasphaera massiliensis, Methanobrevibacter smithii, Monoglobus pectinilyticus, Neglecta timonensis, Parabacteroides distasonis, Parabacteroides merdae, Paraprevotella clara, Parasutterella excrementihominis, Phascolarctobacterium faecium, Porphyromonas asaccharolytica, Roseburia hominis, Ruminococcaceae sp., Ruminococcus bromii, Ruminococcus faecis, Ruthenibacterium lactatiformans, Senegalimassilia anaerobia, Sutterella massiliensis, Sutterella wadsworthensis, and Turicibacter sanguinis.

[0029] In some embodiments, the supportive community of microbes comprises an Akkermansia, an Alistipes, an Anaerostipes, a Bacteroides, a Bifidobacterium, a Bilophila, a Blautia, a Clostridium, a Collinsella aerofaciens, a Coprococcus, Dialister, a Dorea, an Eggerthella, an Eisenbergiella, a Eubacterium, a Faecalibacterium, a Fusicatenibacter, a Gordonibacter, a Holdemanella, a Hungatella, a Lachnoclostridium, a Lachnospiraceae, a Lactobacillus, aMonoglobus, a Neglecta, a Parabacteroides, a Paraprevotella, a Parasutterella, a Phascolarctobacterium, a Porphyromonas, a Roseburia, a Ruminococcaceae, a Ruminococcus, a Ruthenibacterium, and a Sutterella.

[0030] In some embodiments, the supportive community of microbes comprises or consists of Akkermansia mucimphila, Alistipes onderdonkii, Alistipes putredinis, Alistipes shahii, Alistipes timonensis, Anaerostipes hadrus, Bacteroides caccae, Bacteroides fragilis, Bacteroides kribbi, Bacteroides koreensis, Bacteroides massiliensis, Bacteroides nordii, Bacteroides salyersiae, Bacteroides stercorirosoris, Bacteroides stercoris, Bacteroides thetaiotaomicron, Bacteroides uniformis, Bacteroides vulgatus, Bacteroides xylanisolvens, Bifidobacterium adolescentis, Bifidobacterium catenulatum, Bifidobacterium dentium, Bifidobacterium longum, Bifidobacterium pseudocatenulatum, Bilophila wadsworthia, Bilophila wadsworthia, Blautia faecis, Blautia obeum, Blautia wexlerae, Clostridium aldenense, Clostridium bolteae, Clostridium citroniae, Clostridium clostridioforme, Clostridium fessum, Clostridium scindens, Collinsella aerofaciens, Coprococcus comes, Coprococcus eutactus, Dialister invisus, Dialister succinatiphilus, Dorea formicigenerans, Dorea longicatena, Eggerthella lenta, Eisenbergiella tayi, Eubacterium eligens, Eubacterium rectale, Faecalibacterium prausnitzii, Fusicatenibacter saccharivorans, Gordonibacter pamelaeae, Holdemanella biformis, Hungatella effluvia, Lachnoclostridium pacaense, Lachnospiraceae sp., Lactobacillus rogosae, Monoglobus pectinilyticus, Neglecta timonensis, Parabacteroides distasonis, Parabacteroides merdae, Paraprevotella clara, Parasutterella excrementihominis, Phascolarctobacterium faecium, Porphyromonas asaccharolytica, Roseburia hominis, Ruminococcaceae sp., Ruminococcus bromii, Ruminococcus faecis, Ruthenibacterium lactatiformans, Sutterella massiliensis, and Sutterella wadsworthensis.

[0031] In some embodiments, the microbial consortium or the supportive community of microbes comprises 20 to 200, 70 to 80, 80 to 90, 100 to 110, or 150 to 160 microbial strains.

[0032] In some embodiments, the supportive community of microbes comprises between 100 and 150 microbial strains.

[0033] In some embodiments, the plurality of active microbes and the supportive community of microbes are selected from a group of microbes each comprising a 16S sequence at least 80% identical, at least 90% identical, or at least 97% identical to any one of the microbes listed in Table 4, 22, 23, 20, 16, 17, 18 or 19.

[0034] In some embodiments, the plurality of active microbes and the supportive community of microbes consist of a group of microbes each comprising a 16S sequence at least 80% identical, at least 90% identical, or at least 97% identical to any one of the microbes listed in Table 22, 23, 20, 16, 17, 18 or 19.

[0035] In some embodiments, the first metabolic substrate metabolizing activity of one of the plurality of active microbes is significantly different compared to the first metabolic substrate activity of at least one other of the plurality of active microbes when measured in a standardized substrate metabolization assay under the same conditions.

[0036] In some embodiments, one of the plurality of active microbes has a higher first metabolic substrate metabolizing activity at a lower pH compared to at least one other of the plurality of active microbes at the same lower pH. In some embodiments, one of the plurality of active microbes has a higher first metabolic substrate metabolizing activity at a lower pH compared to a first metabolic substrate metabolizing activity of the same active microbe at a higher pH. In some embodiments the lower pH is at 4.5±0.5.

[0037] In some embodiments, one of the plurality of active microbes has a higher first metabolic substrate metabolizing activity at a higher pH compared to at least one other of the plurality of active microbes at the same higher pH. In some embodiments, one of the plurality of active microbes has a higher first metabolic substrate metabolizing activity at a higher pH compared to a first metabolic substrate activity of the same active microbe at a lower pH. In some embodiments, the higher pH is at 7.5±0.5.

[0038] In some embodiments, one of the plurality of active microbes has a higher first metabolic substrate metabolizing activity at a lower pH and one of the plurality of active microbes has a higher first metabolic substrate metabolizing activity at a higher pH. In some embodiments, the difference between the two pH values is at least 1.5, 2.0, 2.5, 3.0, 3.5, or 4.0 pH units.

[0039] In some embodiments, one of the plurality of active microbes has a higher first metabolic substrate metabolizing activity at a lower concentration of first metabolic substrate compared to the first metabolic substrate activity of at least one other of the plurality of active microbes when measured in a standardized substrate metabolization assay under the same conditions. In some embodiments, one of the plurality of active microbes has a higher first metabolic substrate metabolizing activity at a lower concentration of first metabolic substrate compared to a first metabolic substrate metabolizing activity of the same active microbe at a higher concentration of first metabolic substrate. In some embodiments, one of the plurality of active microbes has a higher first metabolic substrate metabolizing activity at a higher concentration of first metabolic substrate compared to the first metabolic substrate activity of at least one other of the plurality of active microbes when measured in a standardized substrate metabolization assay under the same conditions. In some embodiments, one of the plurality of active microbes has a higher first metabolic substrate metabolizing activity at a lower concentration of first metabolic substrate compared to a first metabolic substrate metabolizing activity of the same active microbe at a higher concentration of first metabolic substrate.

[0040] In some embodiments one of the plurality of active microbes has a higher first metabolic substrate metabolizing activity at a lower first metabolic substrate concentration and one of the plurality of active microbes has a higher first metabolic substrate metabolizing activity at a higher first metabolic substrate concentration. In some embodiments, the difference between the two first metabolic substrate concentrations is at least 1.2 fold, 2.0 fold, 3.0 fold, 4.0 fold, 5.0 fold, 6.0 fold, 7.0 fold, 8.0 fold, 9.0 fold, 10 fold, 20 fold, 30 fold, 40 fold, 50 fold, 60 fold, 70 fold, 80 fold, 90 fold, 100 fold, or greater than 100 fold.

[0041] In some embodiments, the microbial consortium of the present invention comprises a plurality of active microbes comprising 2 to 200 microbial strains. In certain embodiments, the plurality of active microbes comprises 2 to 20 microbial strains.

[0042] In some embodiments of the present invention, the first metabolic substrate is oxalate. In some embodiments, the one or more than one metabolite is selected from the group consisting of formate and carbon dioxide (CO₂). In some embodiments, at least one of the plurality of active microbes has a higher oxalate metabolizing activity at 0.75 mM of oxalate compared to the oxalate metabolizing activity of at least one other of the plurality of active microbes when measured in a standardized oxalate metabolization assay under the same conditions. In some embodiments, one of the plurality of active microbes has a higher oxalate metabolizing activity at 0.75 mM of oxalate compared to an oxalate metabolizing activity of the same active microbe at a higher concentration of oxalate. In some embodiments, at least one of the plurality of active microbes has a higher oxalate metabolizing activity at 40 mM of oxalate compared to the oxalate metabolizing activity of at least one other of the plurality of active microbes when measured in a standardized oxalate metabolization assay under the same conditions. In some embodiments, one of the plurality of active microbes has a higher oxalate metabolizing activity at 40 mM of oxalate compared to an oxalate metabolizing activity of the same active microbe at a lower concentration of oxalate. In some embodiments, one of the plurality of active microbes has a higher first metabolic substrate metabolizing activity at 0.75 mM of oxalate and another one of the plurality of active microbes has a higher first metabolic substrate metabolizing activity at 40 mM of oxalate.

[0043] In some embodiments, the standardized substrate metabolization assay comprises analysis of sample microbial cultures using a colorimetric enzyme assay that measures the activity of oxalate oxidase in a culture sample comprising the microbial consortium, wherein the culture sample comprises three or more microbial strains in an appropriate culture medium incubated for 1 hour to 120 hours in the presence of oxalate at a concentration of 0.5 mM to 50 mM, at a pH of 3.5 to 8.0, and at a temperature of 35° C. to 40° C.

[0044] In some embodiments, the standardized substrate metabolization assay comprises liquid chromatography-mass spectrometry, wherein the culture sample comprises three or more microbial strains in an appropriate culture medium incubated for 1 hour to 120 hours in the presence of oxalate at a concentration of 0.5 mM to 50 mM, at a pH of 3.5 to 8.0, and at a temperature of 35° C. to 40° C.

[0045] In some embodiments, the microbial consortium of the present invention further comprises: a fermenting microbe that metabolizes a fermentation substrate to one or more than one fermentation product; and a synthesizing microbe that catalyzes a synthesis reaction that combines the one or more than one metabolite and the one or more than one fermentation product to generate one or more than one synthesis product.

[0046] In some embodiments the one or more than one fermentation product is a second metabolic substrate for the plurality of active microbes or a third metabolic substrate for the synthesizing microbe. In some embodiments the one or more than one synthesis product is a second metabolic substrate for the plurality of active microbes or a fourth metabolic substrate for the fermenting microbe. In some embodiments the fermentation substrate is a polysaccharide and the one or more than one fermentation product is selected from the group consisting of acetate, acetoin, 2-oxoglutarate, propionate, 1,3-propanediol, succinate, ethanol, lactate, butyrate, 2,3-butanediol, acetone, butanol, formate, H₂, and CO₂. In some embodiments, the fermentation substrate is an amino acid and the one or more than one fermentation product is selected from the group consisting of acetate, propionate, butanoate, butyrate, isobutyrate, 2-methylbutyrate, isovalerate, isocaproate, 3-phenylpropanoate, phloretate, 3-(1H-indol-3-yl)propanoate, 5-aminopentanoate, H₂, H₂S, and CO₂.

[0047] In some embodiments the reaction catalyzed by the synthesizing microbe is selected from the group consisting of: synthesis of methane from H₂ and CO₂, methane from formate and H₂, acetate from H₂ and CO₂, acetate from formate and H₂, acetate and sulfide from H₂, CO₂, and sulfate, propionate and CO₂ from succinate, succinate from H₂ and fumarate; synthesis of succinate from formate and fumarate, and butyrate, acetate, H₂, and CO₂ from lactate.

[0048] In some embodiments, the microbial consortium, when administered to an animal on a high oxalate diet, significantly reduces oxalate concentration in a sample selected from the group consisting of blood, serum, stool, or urine, as compared to a sample collected from a corresponding control animal on a high oxalate diet that has not been administered with the microbial consortium.

[0049] In some embodiments, the plurality of active microbes comprises 3 microbial strains. In some embodiments, the plurality of active microbes comprises 3 Proteobacteria strains. In some embodiments, the plurality of active microbes comprises 3 Oxalobacter formigenes strains.

[0050] In some embodiments, the first metabolic substrate is a bile acid. For example, in some embodiments, the bile acid is lithocholic acid (LCA) or deoxycholic acid (DCA). In In some embodiments, the one or more than one metabolite produced by the plurality of active microbes is a secondary bile acid. For example, in some embodiments, the secondary bile acid is selected from the group consisting of iso-lithocholic acid (iso-LCA), or iso-deoxycholic acid (iso-DCA). In some embodiments, the the supportive community of microbes enhances the conversion of one or more conjugated bile acids selected from the group consisting of taurochenodeoxycholic acid (TCDCA), glycochenodeoxycholic acid (GCDCA), taurocholic acid (TCA), and glycocholic acid (GCA), to cholic acid (CA) or chenodeoxycholic acid (CDCA). In some embodiments, the supportive community of microbes enhances the conversion of CA to 7-beta-cholic acid (7betaCA). In other embodiments, the supportive community of microbes enhances the conversion of CDCA to ursodeoxycholic acid (UDCA).

[0051] In some embodiments, at least one of the plurality of active microbes has a higher bile acid metabolization activity at a bile acid concentration of 0.1 mM compared to the bile acid metabolization activity of at least one other of the plurality of active microbes when measured in a standardized bile acid metabolization assay under the same conditions. In some embodiments, at least one of the plurality of active microbes has a higher bile acid metabolizing activity at a bile acid concentration of 0.1 mM compared to a bile acid metabolizing activity of the same active microbe at a higher bile acid concentration. In some embodiments, at least one of the plurality of active microbes has a higher bile acid metabolization activity at a bile acid concentration of 10 mM compared to the bile acid metabolization activity of at least one other of the plurality of active microbes when measured in a standardized bile acid metabolization assay under the same conditions. In some embodiments, at least one of the plurality of active microbes has a higher bile acid metabolizing activity at a bile acid concentration of 10 mM compared to a bile acid metabolizing activity of the same active microbe at a lower bile acid concentration. In some embodiments, one of the plurality of active microbes has a higher bile acid metabolization activity at 0.1 mM of bile acid and another one of the plurality of active microbes has a higher bile acid metabolization activity at 10 mM of bile acid.

[0052] In some embodiments, the standardized substrate metabolization assay comprises using liquid chromatography-mass spectrometry to determine the bile acid profile in a culture sample comprising the microbial consortium, wherein the culture sample comprises three or more microbial strains in an appropriate culture media incubated for 1 hour to 96 hours in the presence of bile acids at a concentration of 0.1 mM to 10 mM, at a pH of 3.5 to 8.0, and at a temperature of 35° C. to 40° C.

[0053] In some embodiments, the plurality of active microbes comprises one or more microbial phyla selected from Firmicutes and Actinobacteria. In some embodiments, the plurality of active microbes comprises one or more microbial strain selected from Eggerthella lenta and Clostridium scindens.

[0054] In some embodiments, the microbial consortium of the present invention is administered as a pre-determined dose ranging from 1×10⁶ to 1×10¹³ total colony forming units (CFU)/kg.

[0055] In some embodiments, the microbial consortium, when administered to the animal, decreases a concentration of the first metabolic substrate in the animal.

[0056] In some embodiments the animal provides an experimental model of the disease.

[0057] The present disclosure also provides a pharmaceutical composition comprising a microbial consortium and a pharmaceutically acceptable carrier or excipient.

[0058] Also provided in the present disclosure is a method of treating a subject diagnosed with or at risk for a metabolic disease or condition selected from the group consisting of primary hyperoxaluria, secondary hyperoxaluria, cholestatic diseases (e.g. primary sclerosing cholangitis, primary biliary cholangitis, progressive familial intrahepatic cholestasis, or nonalcoholic steatohepatitis), and multiple sclerosis with a microbial consortium of the present invention.

[0059] In some embodiments, administration of the pharmaceutical composition disclosed herein reduces levels of the first metabolic substrate in a subject by at least 20%, at least 40%, at least 60%, or at least 80% as compared to an untreated control subject or as compared to pre-administration levels of the first metabolic substrate in the subject. In some embodiments, the first metabolic substrate is oxalate. In other embodiments, the first metabolic substrate is DCA or LCA. In some embodiments the level of first metabolic substrate is determined from a blood, serum, stool, or urine sample.

### BRIEF DESCRIPTION OF THE DRAWINGS

[0060] FIG. 1 shows a bar graph of % in vitro growth inhibition of supportive community strains in the presence of 0.5% oxalate (closed bars) or 0.125% oxalate (open bars) in culture media,

[0061] FIG. 2A shows a bar graph of in vitro oxalate-metabolizing activities of active microbial strains cultured for 72 hours in Mega Media, pH 7.5, containing 7.5 mM oxalate (closed bars) or 750 μM oxalate (open bars). FIG. 2B shows a bar graph of in vitro oxalate-metabolizing activities of active microbial strains cultured for 72 hours in Chopped Meat Media, pH 7.5, containing 7.5 mM oxalate (closed bars) or 750 μM oxalate (open bars).

[0062] FIG. 3A shows a bar graph of in vitro oxalate-metabolizing activities of active microbial strains cultured for 72 hours in Mega Media, at pH 4.5 (closed bars) or 7.2 (open bars), containing 7.5 mM oxalate. FIG. 3B shows a bar graph of in vitro oxalate-metabolizing activities of active microbial strains cultured for 72 hours in Chopped Meat Media, at pH 4.5 (closed bars) or 7.2 (open bars), containing 7.5 mM oxalate.

[0063] FIG. 4A shows a bar graph of in vitro oxalate levels (as measured by Absorbance₅₉₅) in microbial cultures comprising Oxalobacter formigenes only, active strains only, supportive strains only, or both active and supportive strains in Mega Medium. FIG. 4B shows a bar graph of in vitro oxalate levels (as measured by Absorbance₅₉₅) in microbial cultures comprising Oxalobacter formigenes only, active strains only, supportive strains only, or both active and supportive strains in Chopped Meat Medium at pH 7.2. Absorbance₅₉₅ was measured at the start of microbial culture incubation with 7.5 mM oxalate (t=0 hours, closed bars) and after 72 hours incubation with 7.5 mM oxalate (t=72 hours, open bars).

[0064] FIG. 5 shows the percent body weight gain (FIG. 5A), and food consumption (FIG. 5B) of gnotobiotic Balb/c mice on a normal or high oxalate diet, uncolonized or treated by gavage with Oxalobacter formigenes only, active strains only (actives), supportive strains only (supportives), or both active and supportive strains (full community).

[0065] FIG. 6 shows urinary oxalate concentrations of gnotobiotic Balb/c mice on a normal (no-oxalate) (FIG. 6A) or high oxalate (oxalate-supplemented) (FIG. 6B) diet, uncolonized (control) or treated by gavage with Oxalobacter formigenes only (formigenes), active strains only (Active), supportive strains only (Support), or both active and supportive strains (Active+Support).

[0066] FIG. 7 shows serum liver enzyme/function levels in gnotobiotic Balb/c mice on a normal (non-bold) or high oxalate diet (bold), treated by gavage with Oxalobacter formigenes only (O. formigenes), active strains only (Active), supportive strains only (Supportive), both active and supportive strains (Active+Supportive), or saline vehicle control (Saline). ALT=Alanine transaminase (FIG. 7A), AST=Aspartate transaminase (FIG. 7B), ALB=Albumin (FIG. 7C), ALP=Alanine phosphatase (FIG. 7D), A/G Ratio=Albumin/Globulin Ratio (FIG. 7E), TBIL=Total Bilirubin (FIG. 7F), GGT=Gamma-glutamyl transferase (FIG. 7G), TP=Prothrombin Time (FIG. 7H).

[0067] FIG. 8 shows serum kidney enzyme/function levels in gnotobiotic Balb/c mice on a normal (non-bold) or high oxalate diet (bold), treated by gavage with Oxalobacter formigenes only (O. formigenes), active strains only (Active), supportive strains only (Supportive), both active and supportive strains (Active+Supportive), or saline vehicle control (Saline). UREA=Urea (FIG. 8A), CREA=Creatinine (FIG. 8B), PHOS=Phosphorus (FIG. 8C), CA=Calcium (FIG. 8D), CL=Chloride FIG. 8E), NA=Sodium (FIG. 8F), K=Potassium (FIG. 8G), GLOB=Globulin (FIG. 8H).

[0068] FIG. 9 shows serum triglyceride (TRIG, FIG. 9A), cholesterol (CHOL, FIG. 9B), glucose (GLUC, FIG. 9C), and creatine kinase (CK, FIG. 9D) levels in gnotobiotic Balb/c mice on a normal (non-bold) or high oxalate diet (bold), treated by gavage with Oxalobacter formigenes only (O. formigenes), active strains only (Active), supportive strains only (Supportive), both active and supportive strains (Active+Supportive), or saline vehicle control.

[0069] FIG. 10 shows microbial species in fecal samples collected at the time of gavage or 2 weeks post-gavage from gnotobiotic Balb/c mice on a normal (Control; FIG. 10A, FIG. 10B, and FIG. 10C) or high oxalate (High-Ox; FIG. 10D, FIG. 10E, and FIG. 10F) diet, treated with active strains only (Actives; FIG. 10A and FIG. 10D), supportive strains only (Supportives; FIG. 10B and FIG. 10E), or active and supportive strains (Actives+Supportives; FIG. 10C and FIG. 10F).

[0070] FIG. 11 shows a bar graph of in vitro oxalate levels (as measured by LC-MS) in microbial cultures comprising a donor-derived strain grown in YCFAC base medium for 120 h at either pH 7.0 (white bars), pH 6.0 (grey bars), or pH 5.0 (black bars). % oxalate remaining is calculated relative to the amount of oxalate present at the start of the assay (2 mM). Oxalate levels in the pH 6.0 and pH 7.0 O. formigenes cultures (FBI00067) were below the limit of detection at the conclusion of the assay (<1.9% and <1.7% oxalate remaining, respectively).

[0071] FIG. 12 shows growth of cultures of donor-derived O. formigenes strains grown in YCFAC base medium supplemented with the indicated concentration of oxalate (0 mM, 2 mM, 40 mM, 80 mM, 120 mM, 160 mM) and grown for 144 hours (x-axis). Cultures are monitored by turbidity (OD600; y-axis). FIG. 12A-C show culture growth at pH 7.0 for the indicated strains, FIG. 12D-F show culture growth at pH 6.0 for the indicated strains, and FIG. 12G-I show culture growth at pH 5.0 for the indicated strains.

[0072] FIG. 13 shows urinary oxalate levels in germ-free C57Bl/6NTac mice (n=4 per condition) fed a low-complexity high-oxalate diet, uncolonized (−) or treated by gavage with one of 5 candidate microbial consortia (I to V) or a proof-of-concept consortium (+).

[0073] FIG. 14 shows urinary oxalate levels in germ-free C57Bl/6NTac mice (n=4 per condition) fed a high-complexity diet and given oxalate-supplemented drinking water, uncolonized (−) or treated by gavage with one of 5 candidate microbial consortia (I to V) or a positive-control consortium (+).

[0074] FIG. 15 shows urinary oxalate levels in germ-free C57Bl/6NTac mice (n=4 per condition) which were colonized with a non-oxalate-controlling human microbiome prior to the study. Mice were fed a high-complexity diet and given oxalate-supplemented drinking water, cleared of the human microbiome by antibiotic treatment, and were either left uncolonized (−) or were recolonized by gavage with one of 5 candidate microbial consortia (I to V), a positive-control consortium containing commercial strains (+), or a collection of donor-derived strains (“Putative Oxalate Degraders Only”) comprising 3 O. formigenes strains and a set of additional strains which had been preliminarily classified as oxalate-degrading.

[0075] FIG. 16 shows the diversity of microbial strains in fecal samples from the mice of FIG. 15 (measured by metagenomic sequencing).

[0076] FIG. 17 shows the relative abundance (FIG. 17A) and absolute abundance (FIG. 17B) of O. formigenes in feces of germ-free mice treated with a candidate microbial consortium (I to V) or a supportive community alone that lacks O. formigenes.

[0077] FIG. 18 shows the concentration of various bile acid compounds (including TCA, CA, and DCA) in cultures of commercial strains that were spiked with 100 μM TCA and incubated for 24 h at 37° C.

### DETAILED DESCRIPTION

[0078] Disclosed herein are microbial consortia for administration to an animal comprising a plurality of active microbes which metabolize a first metabolic substrate which causes or contributes to disease in the animal. The microbial consortia disclosed herein further comprise an effective amount of a supportive community of microbes that metabolize one or more than one metabolite produced by the plurality of active microbes, and wherein the one or more than one metabolite inhibits metabolism of the plurality of active microbes. These microbial consortia are advantageous in having enhanced characteristics when administered to an animal as compared to administration of the plurality of active microbes alone Enhanced characteristics of the microbial consortia include one or more of improved gastrointestinal engraftment, increased biomass, increased metabolism of the first metabolic substrate, and improved longitudinal stability.

[0079] To facilitate an understanding of the present invention, a number of terms and phrases are defined below.

[0080] The term “a” and “an” as used herein mean “one or more” and include the plural unless the context is appropriate

[0081] As used herein, the term “active microbes” refers to microbes that express sufficient amounts of one or more than one metabolic enzyme to metabolize a substrate that causes or contributes to disease in an animal.

[0082] As used herein, the term “biomass,” refers to the total mass of one or more than one microbe, or consortium in a given area or volume.

[0083] As used herein, the term “microbial consortium,” refers to a mixture of two or more microbial strains wherein one microbial strain in the mixture has a beneficial or desired effect on another microbial strain in the mixture.

[0084] As used herein, the term “gastrointestinal engraftment” refers to the establishment of one or more than one microbe, or microbial consortium, in one or more than one niche of the gastrointestinal tract that, prior to administration of the one or more than one microbe, or microbial consortium, is absent in the one or more than one microbe, or microbial consortium. Gastrointestinal engraftment may be transient, or may be persistent.

[0085] As used herein, the term “effective amount” refers to an amount sufficient to achieve a beneficial or desired result. In some embodiments, an effective amount can be improved gastrointestinal engraftment of one or more than one of the plurality of active microbes, increased biomass of one or more than one of the plurality of active microbes, increased metabolism of the first metabolic substrate, or improved longitudinal stability).

[0086] As used herein, the term “fermenting microbe” refers to a microbe that expresses sufficient amounts of one or more than one enzyme to catalyze a fermentation reaction in a gastrointestinal niche.

[0087] As used herein, the term “longitudinal stability” refers to the ability of one or more than one microbe, or microbial consortium to remain engrafted and metabolically active in one of more than one niche of the gastrointestinal tract despite transient or long-term environmental changes to the gastrointestinal niche.

[0088] As used herein, the term “metabolism,” “metabolize,” “metabolization,” or variants thereof refers to the biochemical conversion of a metabolic substrate to a metabolic product. In some embodiments, metabolization includes isomerization.

[0089] As used herein, the term “microbe” refers to a microbial organism including, but not limited to, bacteria, archaea, protozoa, and unicellular fungi.

[0090] As used herein, the term “microbial consortium” refers to a preparation of two or more microbes wherein the metabolic product of one of the two or more microbes is the metabolic substrate for one other microbe comprising the consortium.

[0091] As used herein, the term “pharmaceutical composition” refers to the combination of an active agent with a carrier, inert or active, making the composition especially suitable for therapeutic use in vivo or ex vivo.

[0092] As used herein, the term “pharmaceutically acceptable carrier” refers to any of the standard pharmaceutical carriers, such as phosphate buffered saline solution, water, emulsions (e.g., such as oil/water or water/oil emulsions), and various types of wetting agents. The compositions also can include stabilizers and preservatives. For examples of carriers, stabilizers, and adjuvants, see e.g., Martin, Remington's Pharmaceutical Sciences, 15^{th} Ed. Mack Publ. Co., Easton, Pa. [1975].

[0093] As used herein, “significantly” or “significant” refers to a change or alteration in a measurable parameter to a statistically significant degree as determined in accordance with an appropriate statistically relevant test. For example, in some embodiments, a change or alteration is significant if it is statistically significant in accordance with, e.g., a Student's t-test, chi-square, or Mann Whitney test.

[0094] As used herein, the term “standardized substrate metabolization assay” refers to an experimental assay known to persons of ordinary skill in the art used to quantify the amount of substrate converted to a metabolic product.

[0095] As used herein, the term “subject” refers to an organism to be treated by the microbial consortium and compositions described herein. Such organisms preferably include, but are not limited to, mammals (e.g., murines, simians, equines, bovines, porcines, canines, felines, and the like), and more preferably include humans.

[0096] As used herein, the term “supportive community” refers to one or more than one microbial strain that, when administered with an active microbe, enhances one or more than one characteristic of the active microbe selected from the group consisting of gastrointestinal engraftment, biomass, metabolic substrate metabolism, and longitudinal stability.

[0097] As used herein, the term “synthesizing microbe” refers to a microbe that expresses sufficient amounts of one or more than one enzyme to catalyze the combination of one or more than one metabolite produced by an active microbe, and one or more than one fermentation product produced by a fermenting microbe in a gastrointestinal niche.

[0098] The term percent “identity” or “sequence identity,” in the context of two or more nucleic acid or polypeptide sequences, refer to two or more sequences or subsequences that have a specified percentage of nucleotides or amino acid residues that are the same, when compared and aligned for maximum correspondence, as measured using one of the sequence comparison algorithms described below (e.g., BLASTP and BLASTN or other algorithms available to persons of skill) or by visual inspection. Depending on the application, the percent “identity” can exist over a region of the sequence being compared, e.g., over a functional domain, or, alternatively, exist over the full length of the two sequences to be compared.

[0099] For sequence comparison, typically one sequence acts as a reference sequence to which test sequences are compared. When using a sequence comparison algorithm, test and reference sequences are input into a computer, subsequence coordinates are designated, if necessary, and sequence algorithm program parameters are designated. The sequence comparison algorithm then calculates the percent sequence identity for the test sequence(s) relative to the reference sequence, based on the designated program parameters.

[0100] Optimal alignment of sequences for comparison can be conducted, e.g., by the local homology algorithm of Smith & Waterman, Adv. Appl. Math. 2:482 (1981), by the homology alignment algorithm of Needleman & Wunsch, J. Mol. Biol. 48:443 (1970), by the search for similarity method of Pearson & Lipman, Proc. Nat'l. Acad. Sci. USA 85:2444 (1988), by computerized implementations of these algorithms (GAP, BESTFIT, FASTA, and TFASTA in the Wisconsin Genetics Software Package, Genetics Computer Group, 575 Science Dr., Madison, Wis.), or by visual inspection (see generally Ausubel et al., infra).

[0101] One example of an algorithm that is suitable for determining percent sequence identity and sequence similarity is the BLAST algorithm, which is described in Altschul et al., J. Mol. Biol. 215:403-410 (1990). Software for performing BLAST analyses is publicly available through the National Center for Biotechnology Information (www.ncbi.nlm.nih.gov/).

[0102] When used in reference to 16S rRNA sequences, a “sequence identity” of at least 97% indicates that two microbial strains are likely to belong to the same species, whereas 16S rRNA sequences having less than 97% sequence identity indicate that two microbial strains likely belong to different species, and 16S rRNA sequences having less than 95% sequence identity indicates that two microbial strains likely belong to distinct genera (Stackebrandt E., and Goebel, B. M., Int J Syst Bact, 44 (1994) 846-849.).

[0103] Throughout the description, where compositions are described as having, including, or comprising specific components, or where processes and methods are described as having, including, or comprising specific steps, it is contemplated that, additionally, there are compositions of the present invention that consist essentially of, or consist of, the recited components, and that there are processes and methods according to the present invention that consist essentially of, or consist of, the recited processing steps.

[0104] As a general matter, compositions specifying a percentage are by weight unless otherwise specified. Further, if a variable is not accompanied by a definition, then the previous definition of the variable controls.

### Biological Niches

[0105] The present invention provides microbial consortia capable of engrafting into one or more than one niche of a gastrointestinal tract where it is capable of metabolizing a substrate that causes or contributes to disease in an animal. These niches comprise specific microbial communities whose composition varies according to a number of environmental factors including, but not limited to, the particular physical compartment of the gastrointestinal tract inhabited by a microbial community, the chemical and physicochemical properties of the environment inhabited, the metabolic substrate composition of the environment inhabited, and other co-inhabiting microbial species.

### Physical Compartments

[0106] A gastrointestinal tract comprises a number of physical compartments. For example, the human gastrointestinal tract includes the oral cavity, pharynx, esophagus, stomach, small intestine (duodenum, jejunum, ileum), cecum, large intestine (ascending colon, transverse colon, descending colon), and rectum. The pancreas, liver, gallbladder, and associated ducts, additionally comprise compartments of the human gastrointestinal tract. Each of these compartments has, for example, variable anatomical shape and dimension, aeration, water content, levels of mucus secretion, luminal presence of antimicrobial peptides, and presence or absence of peristaltic motility. Furthermore, the different gastrointestinal compartments vary in their pH. In humans, the pH of the oral cavity, upper stomach, lower stomach, duodenum, jejunum, ileum, and colon range from 6.5-7.5, 4.0-6.5, 1.5-4.0, 7.0-8.5, 4.0-7.0, and 4.0-7.0, respectively. Compartments of the gastrointestinal tract also differ in their levels of oxygenation which are subject to large degrees of fluctuation. For example, the luminal partial pressure of oxygen in the stomach of mice has been measured to be approximately 58 mm Hg, while the luminal partial pressure of oxygen in the distal sigmoid colon has been measured to be approximately 3 mm Hg (He et al., 1999). Oxygen levels of the gastrointestinal tract are highly determinative of the biochemical pathways utilized by commensal microbes. For example, commensal bacteria utilize aerobic respiration at oxygen concentrations above 5 mbar of 02, anaerobic respiration between 1-5 mbar of 02, and fermentation at 02 concentrations below 1 mbar. The sensitivity of microbes to 02 levels and their ability to carry out metabolic reactions under aerobic and/or anaerobic conditions influences which microbial species engraft in a particular gastrointestinal compartment.

### Metabolic Compartments

[0107] In addition to the various physical and chemical environments contributing to a gastrointestinal niche, different niches comprise different metabolic substrates.

[0108] Metabolic substrates that may be present in a gastrointestinal niche may include, but are not limited to, oxalate, fructan, inulin, glucuronoxylan, arabinoxylan, glucomannan, β-mannan, dextran, starch, arabinan, xyloglucan, galacturonan, β-glucan, galactomannan, rhamnogalacturonan I, rhamnogalacturonan II, arabinogalactan, mucin O-linked glycans, yeast α-mannan, yeast β-glucan, chitin, alginate, porphyrin, laminarin, carrageenan, agarose, alternan, levan, xanthan gum, galactooligosaccharides, hyaluronan, chondrointin sulfate, dermatan sulfate, heparin sulfate, keratan sulfate, phenylalanine, tyrosine, tryptophan, leucine, valine, isoleucine, glycine, proline, asparagine, glutamine, aspartate, glutamate, cysteine, lysine, arginine, serine, methionine, alanine, arginine, histidine, ornithine, citrulline, carnitine, hydroxyproline, cholic acid, chenodeoxycholic acid, taurochenodeoxycholic acid, glycochenodeoxycholic acid, cholesterol, cinnamic acid, coumaric acid, sinapinic acid, ferulic acid, caffeic acid, quinic acid, chlorogenic acid, catechin, epicatechin, gallic acid, pyrogallol, catechol, quercetin, myricetin, campherol, luteolin, apigenin, naringenin, and hesperidin.

### Microbial Consortia

[0109] The present invention provides microbial consortia comprising a plurality of active microbes and an effective amount of a supportive community of microbes. In some embodiments, a microbial consortium comprises 3 to 500 microbial strains. For example, in some embodiments, a microbial consortium comprises 3 to 500, 4 to 500, 5 to 500, 6 to 500, 7 to 500, 8 to 500, 9 to 500, 10 to 500, 11 to 500, 12 to 500, 13 to 500, 14 to 500, 15 to 500, 16 to 500, 17 to 500, 18 to 500, 19 to 500, 20 to 500, 21 to 500, 22 to 500, 23 to 500, 24 to 500, 25 to 500, 30 to 500, 35 to 500, 40 to 500, 45 to 500, 50 to 500, 60 to 500, 70 to 500, 80 to 500, 90 to 500, 100 to 500, 110 to 500, 120 to 500, 130 to 500, 140 to 500, 150 to 500, 160 to 500, 170 to 500, 180 to 500, 190 to 500, 200 to 500, 210 to 500, 220 to 500, 230 to 500, 240 to 500, 250 to 500, 260 to 500, 270 to 500, 280 to 500, 290 to 500, 300 to 500, 400 to 500, 3 to 300, 4 to 300, 5 to 300, 6 to 300, 7 to 300, 8 to 300, 9 to 300, 10 to 300, 11 to 300, 12 to 300, 13 to 300, 14 to 300, 15 to 300, 16 to 300, 17 to 300, 18 to 300, 19 to 300, 20 to 300, 21 to 300, 22 to 300, 23 to 300, 24 to 300, 25 to 300, 30 to 300, 35 to 300, 40 to 300, 45 to 300, 50 to 300, 60 to 300, 70 to 300, 80 to 300, 90 to 300, 100 to 300, 110 to 300, 120 to 300, 130 to 300, 140 to 300, 150 to 300, 160 to 300, 170 to 300, 180 to 300, 190 to 300, 200 to 300, 210 to 300, 220 to 300, 230 to 300, 240 to 300, 250 to 300, 260 to 300, 270 to 300, 280 to 300, 290 to 300, 3 to 250, 4 to 250, 5 to 250, 6 to 250, 7 to 250, 8 to 250, 9 to 250, 10 to 250, 11 to 250, 12 to 250, 13 to 250, 14 to 250, 15 to 250, 16 to 250, 17 to 250, 18 to 250, 19 to 250, 20 to 250, 21 to 250, 22 to 250, 23 to 250, 24 to 250, 25 to 250, 30 to 250, 35 to 250, 40 to 250, 45 to 250, 50 to 250, 60 to 250, 70 to 250, 80 to 250, 90 to 250, 100 to 250, 110 to 250, 120 to 250, 130 to 250, 140 to 250, 150 to 250, 160 to 250, 170 to 250, 180 to 250, 190 to 250, 200 to 250, 210 to 250, 220 to 250, 230 to 250, 240 to 250, 3 to 200, 4 to 200, 5 to 200, 6 to 200, 7 to 200, 8 to 200, 9 to 200, 10 to 200, 11 to 200, 12 to 200, 13 to 200, 14 to 200, 15 to 200, 16 to 200, 17 to 200, 18 to 200, 19 to 200, 20 to 200, 21 to 200, 22 to 200, 23 to 200, 24 to 200, 25 to 200, 30 to 200, 35 to 200, 40 to 200, 45 to 200, 50 to 200, 60 to 200, 70 to 200, 80 to 200, 90 to 200, 100 to 200, 110 to 200, 120 to 200, 130 to 200, 140 to 200, 150 to 200, 160 to 200, 170 to 200, 180 to 200, 190 to 200, 3 to 150, 4 to 150, 5 to 150, 6 to 150, 7 to 150, 8 to 150, 9 to 150, 10 to 150, 11 to 150, 12 to 150, 13 to 150, 14 to 150, 15 to 150, 16 to 150, 17 to 150, 18 to 150, 19 to 150, 20 to 150, 21 to 150, 22 to 150, 23 to 150, 24 to 150, 25 to 150, 30 to 150, 35 to 150, 40 to 150, 45 to 150, 50 to 150, 60 to 150, 70 to 150, 80 to 150, 90 to 150, 100 to 150, 110 to 150, 120 to 150, 130 to 150, 140 to 150, 3 to 100, 4 to 100, 5 to 100, 6 to 100, 7 to 100, 8 to 100, 9 to 100, 10 to 100, 11 to 100, 12 to 100, 13 to 100, 14 to 100, 15 to 100, 16 to 100, 17 to 100, 18 to 100, 19 to 100, 20 to 100, 21 to 100, 22 to 100, 23 to 100, 24 to 100, 25 to 100, 30 to 100, 35 to 100, 40 to 100, 45 to 100, 50 to 100, 60 to 100, 70 to 100, 80 to 100, 90 to 100, 3 to 75, 4 to 75, 5 to 75, 6 to 75, 7 to 75, 8 to 75, 9 to 75, 10 to 75, 11 to 75, 12 to 75, 13 to 75, 14 to 75, 15 to 75, 16 to 75, 17 to 75, 18 to 75, 19 to 75, 20 to 75, 21 to 75, 22 to 75, 23 to 75, 24 to 75, 25 to 75, 30 to 75, 35 to 75, 40 to 75, 45 to 75, 50 to 75, 60 to 75, 70 to 75, 3 to 50, 4 to 50, 5 to 50, 6 to 50, 7 to 50, 8 to 50, 9 to 50, 10 to 50, 11 to 50, 12 to 50, 13 to 50, 14 to 50, 15 to 50, 16 to 50, 17 to 50, 18 to 50, 19 to 50, 20 to 50, 21 to 50, 22 to 50, 23 to 50, 24 to 50, 25 to 50, 30 to 50, 35 to 50, 40 to 50, 45 to 50, 3 to 25, 4 to 25, 5 to 25, 6 to 25, 7 to 25, 8 to 25, 9 to 25, 10 to 25, 11 to 25, 12 to 25, 13 to 25, 14 to 25, 15 to 25, 16 to 25, 17 to 25, 18 to 25, 19 to 25, 20 to 25, 21 to 25, 22 to 25, 23 to 25, or 24 to 25 microbial strains. For example, in some embodiments, a microbial consortium comprises about 20 to about 200, about 70 to about 80, about 80 to about 90, about 100 to about 110, or about 150 to about 160 microbial strains.

[0110] In some embodiments, a microbial consortium described herein comprises a microbial strain having a relative abundance of approximately 90%, 80%, 70%, 60%, 50%, 40%, 30%, 20%, 10%, 5%, 1%, 0.1%, 0.01%, 0.001%, 0.0001%, 0.00001%, or 0.000001% of the total microbial consortium. In some embodiments, the relative abundance of a microbial strain is determined by metagenomic sequencing and calculated as the percentage of reads that are classified as an identified microbial strain, divided by the genome size. For example, in some embodiments, the relative abundance of a microbial strain of the invention is determined by metagenomic shotgun sequencing.

### Active Microbes

[0111] The microbial consortia of the present invention comprise a plurality of active microbes capable of metabolizing a first metabolic substrate that causes or contributes to disease in an animal. In some embodiments, the current invention provides a microbial consortium capable of metabolizing the first metabolic substrate at a pH within a range of 4 to 8. For example, in some embodiments, one or more than one of the plurality of active microbes is capable of metabolizing a first metabolic substrate at a pH within a range of 4 to 8, 4.2 to 8, 4.4 to 8, 4.6 to 8, 4.8 to 8, 5 to 8, 5.2 to 8, 5.4 to 8, 5.6 to 8, 5.8 to 8, 6 to 8, 6.2 to 8, 6.4 to 8, 6.6 to 8, 6.8 to 8, 7 to 8, 7.2 to 8, 7.4 to 8, 7.6 to 8, 7.8 to 8, 4 to 7, 4.2 to 7, 4.4 to 7, 4.6 to 7, 4.8 to 7, 5 to 7, 5.2 to 7, 5.4 to 7, 5.6 to 7, 5.8 to 7, 6 to 7, 6.2 to 7, 6.4 to 7, 6.6 to 7, 6.8 to 7, 4 to 6, 4.2 to 6, 4.4 to 6, 4.6 to 6, 4.8 to 6, 5 to 6, 5.2 to 6, 5.4 to 6, 5.6 to 6, 5.8 to 6, 4 to 6, 4.2 to 6, 4.4 to 6, 4.6 to 6, 4.8 to 6, 5 to 6, 5.2 to 6, 5.4 to 6, 5.6 to 6, or 5.8 to 6.

[0112] In some embodiments, the plurality of active microbes comprises one microbial strain having a significantly different first metabolic substrate-metabolizing activity in a standard substrate-metabolizing assay conducted at two pH values differing by 1 pH unit and within a pH range of 4 to 8. In some embodiments, the difference between the two pH values is 1.0, 1.1, 1.2, 1.3, 1.4, 1.5, 1.6, 1.7, 1.8, 1.9, 2.0, 2.1, 2.2, 2.3, 2.4, 2.5, 2.6, 2.7, 2.8, 2.9, 3.0, 3.2, 3.2, 3.3, 3.4, 3.5, 3.6, 3.7, 3.8, 3.9, or 4.0 pH units. For example, in some embodiments, one microbial strain has significantly different first metabolic substrate-metabolizing activities in a standard substrate metabolizing assay at pH 4 and pH 8, pH 5 and pH 8, pH 6 and pH 8, pH 7 and pH 8, pH 4 and pH 7, pH 5 and pH 7, pH 6 and pH 7, pH 4 and pH 6, pH 5 and pH 6, or pH 4 and pH 5.

[0113] As used herein, “lower pH” refers to a pH in a standardized substrate metabolization assay that is lower in value as compared to another pH value. For example, a standardized substrate metabolization assay performed at pH 4.5 has a lower pH as compared to a standardized substrate metabolization assay preformed at a pH of 7.5. “Higher pH,” as used herein, refers to a pH in a standardized substrate metabolization assay that is higher in value as compared to another pH value. For example a standardized substrate metabolization assay preformed at pH 7.5 has a higher pH as compared to a standardized substrate metabolization assay performed at a pH of 4.5.

[0114] As used herein, “higher first metabolic substrate-metabolizing activity” means either a first metabolic substrate-metabolizing activity of a microbial strain that is higher as compared to a first metabolic substrate-metabolizing activity of the same microbial strain under different conditions, and/or a first metabolic substrate-metabolizing activity of a microbial strain that is higher as compared to a first metabolic substrate-metabolizing activity of a different microbial strain under the same conditions.

[0115] In some embodiments, the plurality of active microbes comprises two microbial strains having significantly different first metabolic substrate-metabolizing activities. For example, in some embodiments, one of the plurality of active microbes has a significantly higher first metabolic substrate-metabolizing activity at a lower pH as compared to the first metabolic substrate-metabolizing activity of another microbial strain in the plurality of active microbes at the same lower pH. In some embodiments, one of the plurality of active microbes has a significantly higher first metabolic substrate-metabolizing activity at pH 4.0, 4.5, 5.0, 5.5, 6.0, or 6.5 as compared to the first metabolic substrate-metabolizing activity of another microbial strain in the plurality of active microbes at pH 4.0, 4.5, 5.0, 5.5, 6.0, or 6.5, respectively. In some embodiments, one of the plurality of active microbes has a significantly higher first metabolic substrate-metabolizing activity at a higher pH as compared to the first metabolic substrate-metabolizing activity of another microbial strain in the plurality of active microbes at the same higher pH. In some embodiments, one of the plurality of active microbes has a significantly higher first metabolic substrate-metabolizing activity at pH 7.5, 7.6, 7.7, 7.8, 7.9, or 8.0 as compared to the first metabolic substrate-metabolizing activity of another microbial strain in the plurality of active microbes at pH 7.5, 7.6, 7.7, 7.8, 7.9, or 8.0, respectively.

[0116] In some embodiments, one of the plurality of active microbes has a significantly higher first metabolic substrate-metabolizing activity at a lower pH as compared to its first metabolic substrate-metabolizing activity at a higher pH. For example, in some embodiments one of the plurality of active microbes has a significantly higher first metabolic substrate-metabolizing activity at pH 4.0, 4.5, 5.0, 5.5, 6.0, or 6.5 than it does at pH 7.5, 7.6, 7.7, 7.8, 7.9, or 8.0. In some embodiments, one of the plurality of active microbes has a significantly higher first metabolic substrate-metabolizing activity at a higher pH as compared to its first metabolic substrate-metabolizing activity at a lower pH. For example, in some embodiments one of the plurality of active microbes has a significantly higher first metabolic substrate-metabolizing activity at pH 7.5, 7.6, 7.7, 7.8, 7.9, or 8.0 than it does at pH 4.0, 4.5, 5.0, 5.5, 6.0, or 6.5.

[0117] In some embodiments, the plurality of active microbes comprises an active microbe having a higher first metabolic substrate-metabolizing activity at a lower pH and another microbe having a higher first metabolic substrate-metabolizing activity at a higher pH. For example, in some embodiments, the plurality of active microbes comprises an active microbe having a higher first metabolic substrate-metabolizing activity at pH 4.0 and another microbe having a higher first metabolic substrate-metabolizing activity at pH 7.5. In some embodiments, the plurality of active microbes comprises an active microbe having a higher first metabolic substrate-metabolizing activity at pH 4.0 and another microbe having a higher first metabolic substrate-metabolizing activity at pH 7.6. In some embodiments, the plurality of active microbes comprises an active microbe having a higher first metabolic substrate-metabolizing activity at pH 4.0 and another microbe having a higher first metabolic substrate-metabolizing activity at pH 7.7. In some embodiments, the plurality of active microbes comprises an active microbe having a higher first metabolic substrate-metabolizing activity at pH 4.0 and another microbe having a higher first metabolic substrate-metabolizing activity at pH 7.8. In some embodiments, the plurality of active microbes comprises an active microbe having a higher first metabolic substrate-metabolizing activity at pH 4.0 and another microbe having a higher first metabolic substrate-metabolizing activity at pH 7.9. In some embodiments, the plurality of active microbes comprises an active microbe having a higher first metabolic substrate-metabolizing activity at pH 4.0 and another microbe having a higher first metabolic substrate-metabolizing activity at pH 8.0. In some embodiments, the plurality of active microbes comprises an active microbe having a higher first metabolic substrate-metabolizing activity at pH 4.5 and another microbe having a higher first metabolic substrate-metabolizing activity at pH 7.5. In some embodiments, the plurality of active microbes comprises an active microbe having a higher first metabolic substrate-metabolizing activity at pH 4.5 and another microbe having a higher first metabolic substrate-metabolizing activity at pH 7.6. In some embodiments, the plurality of active microbes comprises an active microbe having a higher first metabolic substrate-metabolizing activity at pH 4.5 and another microbe having a higher first metabolic substrate-metabolizing activity at pH 7.7. In some embodiments, the plurality of active microbes comprises an active microbe having a higher first metabolic substrate-metabolizing activity at pH 4.5 and another microbe having a higher first metabolic substrate-metabolizing activity at pH 7.8. In some embodiments, the plurality of active microbes comprises an active microbe having a higher first metabolic substrate-metabolizing activity at pH 4.5 and another microbe having a higher first metabolic substrate-metabolizing activity at pH 7.9. In some embodiments, the plurality of active microbes comprises an active microbe having a higher first metabolic substrate-metabolizing activity at pH 4.5 and another microbe having a higher first metabolic substrate-metabolizing activity at pH 8.0. In some embodiments, the plurality of active microbes comprises an active microbe having a higher first metabolic substrate-metabolizing activity at pH 5.0 and another microbe having a higher first metabolic substrate-metabolizing activity at pH 7.5. In some embodiments, the plurality of active microbes comprises an active microbe having a higher first metabolic substrate-metabolizing activity at pH 5.0 and another microbe having a higher first metabolic substrate-metabolizing activity at pH 7.6. In some embodiments, the plurality of active microbes comprises an active microbe having a higher first metabolic substrate-metabolizing activity at pH 5.0 and another microbe having a higher first metabolic substrate-metabolizing activity at pH 7.7. In some embodiments, the plurality of active microbes comprises an active microbe having a higher first metabolic substrate-metabolizing activity at pH 5.0 and another microbe having a higher first metabolic substrate-metabolizing activity at pH 7.8. In some embodiments, the plurality of active microbes comprises an active microbe having a higher first metabolic substrate-metabolizing activity at pH 5.0 and another microbe having a higher first metabolic substrate-metabolizing activity at pH 7.9. In some embodiments, the plurality of active microbes comprises an active microbe having a higher first metabolic substrate-metabolizing activity at pH 5.0 and another microbe having a higher first metabolic substrate-metabolizing activity at pH 8.0. In some embodiments, the plurality of active microbes comprises an active microbe having a higher first metabolic substrate-metabolizing activity at pH 5.5 and another microbe having a higher first metabolic substrate-metabolizing activity at pH 7.5. In some embodiments, the plurality of active microbes comprises an active microbe having a higher first metabolic substrate-metabolizing activity at pH 5.5 and another microbe having a higher first metabolic substrate-metabolizing activity at pH 7.6. In some embodiments, the plurality of active microbes comprises an active microbe having a higher first metabolic substrate-metabolizing activity at pH 5.5 and another microbe having a higher first metabolic substrate-metabolizing activity at pH 7.7. In some embodiments, the plurality of active microbes comprises an active microbe having a higher first metabolic substrate-metabolizing activity at pH 5.5 and another microbe having a higher first metabolic substrate-metabolizing activity at pH 7.8. In some embodiments, the plurality of active microbes comprises an active microbe having a higher first metabolic substrate-metabolizing activity at pH 5.5 and another microbe having a higher first metabolic substrate-metabolizing activity at pH 7.9. In some embodiments, the plurality of active microbes comprises an active microbe having a higher first metabolic substrate-metabolizing activity at pH 5.5 and another microbe having a higher first metabolic substrate-metabolizing activity at pH 8.0. In some embodiments, the plurality of active microbes comprises an active microbe having a higher first metabolic substrate-metabolizing activity at pH 6.0 and another microbe having a higher first metabolic substrate-metabolizing activity at pH 7.5. In some embodiments, the plurality of active microbes comprises an active microbe having a higher first metabolic substrate-metabolizing activity at pH 6.0 and another microbe having a higher first metabolic substrate-metabolizing activity at pH 7.6. In some embodiments, the plurality of active microbes comprises an active microbe having a higher first metabolic substrate-metabolizing activity at pH 6.0 and another microbe having a higher first metabolic substrate-metabolizing activity at pH 7.7. In some embodiments, the plurality of active microbes comprises an active microbe having a higher first metabolic substrate-metabolizing activity at pH 6.0 and another microbe having a higher first metabolic substrate-metabolizing activity at pH 7.8. In some embodiments, the plurality of active microbes comprises an active microbe having a higher first metabolic substrate-metabolizing activity at pH 6.0 and another microbe having a higher first metabolic substrate-metabolizing activity at pH 7.9. In some embodiments, the plurality of active microbes comprises an active microbe having a higher first metabolic substrate-metabolizing activity at pH 6.0 and another microbe having a higher first metabolic substrate-metabolizing activity at pH 8.0. In some embodiments, the plurality of active microbes comprises an active microbe having a higher first metabolic substrate-metabolizing activity at pH 6.5 and another microbe having a higher first metabolic substrate-metabolizing activity at pH 7.5. In some embodiments, the plurality of active microbes comprises an active microbe having a higher first metabolic substrate-metabolizing activity at pH 6.5 and another microbe having a higher first metabolic substrate-metabolizing activity at pH 7.6. In some embodiments, the plurality of active microbes comprises an active microbe having a higher first metabolic substrate-metabolizing activity at pH 6.5 and another microbe having a higher first metabolic substrate-metabolizing activity at pH 7.7. In some embodiments, the plurality of active microbes comprises an active microbe having a higher first metabolic substrate-metabolizing activity at pH 6.5 and another microbe having a higher first metabolic substrate-metabolizing activity at pH 7.8. In some embodiments, the plurality of active microbes comprises an active microbe having a higher first metabolic substrate-metabolizing activity at pH 6.5 and another microbe having a higher first metabolic substrate-metabolizing activity at pH 7.9. In some embodiments, the plurality of active microbes comprises an active microbe having a higher first metabolic substrate-metabolizing activity at pH 6.5 and another microbe having a higher first metabolic substrate-metabolizing activity at pH 8.0.

[0118] In some embodiments, the plurality of active microbes comprises one microbial strain having a significantly different first metabolic substrate-metabolizing activity in a standard substrate-metabolizing assay conducted at a first metabolic substrate concentration as compared to its first metabolic substrate-metabolizing activity in a standard substrate-metabolizing assay conducted at a different first metabolic substrate concentration, wherein the difference between the two first metabolic substrate concentrations is within a 100 fold range. In some embodiments, the difference between the two first metabolic concentrations is 1.2 fold. For example, in some embodiments, the difference between the two first metabolic substrate concentrations is at least 1.2 fold, 1.4 fold, 1.6 fold, 1.8 fold, 2.0 fold, 4 fold, 6 fold, 8 fold, 10 fold, 20 fold, 30 fold, 40 fold, 50 fold, 60 fold, 70 fold, 80 fold, 90 fold, or 100 fold or greater.

[0119] As used herein, “lower concentration of first metabolic substrate” refers to a substrate concentration in a standardized substrate metabolization assay that is lower in value as compared to another substrate concentration. “Higher concentration of first metabolic substrate,” as used herein, refers to a substrate concentration in a standardized substrate metabolization assay that is higher in value as compared to another substrate concentration.

[0120] In some embodiments, the plurality of active microbes comprises two microbial strains having significantly different first metabolic substrate-metabolizing activities. For example, in some embodiments, one of the plurality of active microbes has a significantly higher first metabolic substrate-metabolizing activity at a lower concentration of first metabolic substrate as compared to the first metabolic substrate-metabolizing activity of another microbial strain in the plurality of active microbes at the same lower concentration of first metabolic substrate. In some embodiments, one of the plurality of active microbes has a significantly higher first metabolic substrate-metabolizing activity at a higher concentration of first metabolic substrate as compared to the first metabolic substrate-metabolizing activity of another microbial strain in the plurality of active microbes at the same higher concentration of first metabolic substrate.

[0121] In some embodiments, one of the plurality of active microbes has a significantly higher first metabolic substrate-metabolizing activity at a lower concentration of first metabolic substrate as compared to its first metabolic substrate-metabolizing activity at a higher concentration of first metabolic substrate. In some embodiments, one of the plurality of active microbes has a significantly higher first metabolic substrate-metabolizing activity at a higher concentration of first metabolic substrate as compared to its first metabolic substrate-metabolizing activity at a lower concentration of first metabolic substrate.

[0122] In some embodiments, the plurality of active microbes comprises an active microbe having a higher first metabolic substrate-metabolizing activity at a lower concentration of first metabolic substrate and another microbe having a higher first metabolic substrate-metabolizing activity at a higher concentration of first metabolic substrate. For example, in some embodiments, the difference between the lower concentration of first metabolic substrate and the higher concentration of first metabolic substrate is at least 1.2 fold, 1.4 fold, 1.6 fold, 1.8 fold, 2.0 fold, 4 fold, 6 fold, 8 fold, 10 fold, 20 fold, 30 fold, 40 fold, 50 fold, 60 fold, 70 fold, 80 fold, 90 fold, or 100 fold or greater.

[0123] In some embodiments, the plurality of active microbes comprises two microbial strains having significantly different growth rates. For example, in some embodiments, one of the plurality of active microbes has a significantly higher growth rate at a lower pH as compared to the growth rate of another microbial strain in the plurality of active microbes at the same lower pH. In some embodiments, one of the plurality of active microbes has a significantly higher growth rate at pH 4.0, 4.5, 5.0, 5.5, 6.0, or 6.5 as compared to the growth rate of another microbial strain in the plurality of active microbes at pH 4.0, 4.5, 5.0, 5.5, 6.0, or 6.5, respectively. In some embodiments, one of the plurality of active microbes has a significantly higher growth rate at a higher pH as compared to the growth rate of another microbial strain in the plurality of active microbes at the same higher pH. In some embodiments, one of the plurality of active microbes has a significantly higher growth rate at pH 7.5, 7.6, 7.7, 7.8, 7.9, or 8.0 as compared to the growth rate of another microbial strain in the plurality of active microbes at pH 7.5, 7.6, 7.7, 7.8, 7.9, or 8.0, respectively.

[0124] In some embodiments, one of the plurality of active microbes has a significantly higher growth rate at a lower pH as compared to its growth rate at a higher pH. For example, in some embodiments one of the plurality of active microbes has a significantly higher growth rate at pH 4.0, 4.5, 5.0, 5.5, 6.0, or 6.5 than it does at pH 7.5, 7.6, 7.7, 7.8, 7.9, or 8.0. In some embodiments, one of the plurality of active microbes has a significantly higher growth rate at a higher pH as compared to its growth rate at a lower pH. For example, in some embodiments one of the plurality of active microbes has a significantly higher growth rate at pH 7.5, 7.6, 7.7, 7.8, 7.9, or 8.0 than it does at pH 4.0, 4.5, 5.0, 5.5, 6.0, or 6.5.

[0125] In some embodiments, the plurality of active microbes comprises one microbial strain having a significantly higher growth rate when cultured in media containing a certain concentration of first metabolic substrate concentration as compared to the growth rate of another microbial strain in the plurality of active microbes cultured in the same media containing the same concentration of the first metabolic substrate. In some embodiments, the difference between the two growth rates is at least 0.2 fold, at least 0.4 fold, at least 0.6 fold, at least 0.8 fold, at least 1.0 fold, at least 1.2 fold, at least 1.4 fold, at least 1.6 fold, at least 1.8 fold, or at least 2.0 fold.

[0126] In some embodiments, the first metabolic substrate may be selected from, but not limited to, oxalate and a bile acid (e.g., lithocholic acid (LCA), deoxycholic acid (DCA)).

[0127] In some embodiments, the current disclosure provides a microbial consortium comprising a plurality of active microbes capable of metabolizing a first metabolic substrate to one or more than one metabolite. For example, in some embodiments, the one or more than one metabolite may be selected from, but not limited to, formate, CO₂, and a secondary bile acid (e.g., 3-oxo-deoxycholic acid (3 oxoDCA), 3-oxo-lithocholic acid (3oxoLCA), iso-lithocholic acid (iso-LCA), or iso-deoxycholic acid (iso-DCA)). In some embodiments, the plurality of active microbes can comprise 2 to 200 microbial strains. For example, in some embodiments, a microbial consortium comprises 2 to 10, 2 to 15, 2 to 20, 2 to 25, 2 to 30, 2 to 35, 2 to 40, 2 to 45, 2 to 50, 2 to 75, 2 to 100, 2 to 125, 2 to 150, 2 to 175, or 2 to 200 active microbial strains. In certain embodiments, the plurality of active microbes can comprise 2 to 20 microbial strains.

### Oxalate Metabolizing Active Microbes

[0128] In one aspect, the current disclosure provides a microbial consortium comprising a plurality of active microbes that metabolize oxalate. In some embodiments, each of the plurality of active microbes that metabolize oxalate express sufficient amounts of one or more than one enzyme involved in oxalate metabolism. For example, in some embodiments, one or more than one active microbe expresses formyl-CoA transferase (Frc), an oxalate-formate antiporter (e.g., OxIT), and oxalyl-CoA decarboxylase (e.g., OxC), and/or oxalate decarboxylase (e.g., OxD).

[0129] In some embodiments, the plurality of active microbes that metabolize oxalate comprise 2 to 20 oxalate-metabolizing microbial strains. For example, in some embodiments, a microbial consortium comprises 2 to 20, 3 to 20, 4 to 20, 5 to 20, 6 to 20, 7 to 20, 8 to 20, 9 to 20, 10 to 20, 11 to 20, 12 to 20, 13 to 20, 14 to 20, 15 to 20, 16 to 20, 17 to 20, 18 to 20, 19 to 20, 2 to 18, 3 to 18, 4 to 18, 5 to 18, 6 to 18, 7 to 18, 8 to 18, 9 to 18, 10 to 18, 11 to 18, 12 to 18, 13 to 18, 14 to 18, 15 to 18, 16 to 18, 17 to 18, 2 to 16, 3 to 16, 4 to 16, 5 to 16, 6 to 16, 7 to 16, 8 to 16, 9 to 16, 10 to 16, 11 to 16, 12 to 16, 13 to 16, 14 to 16, 15 to 16, 2 to 14, 3 to 14, 4 to 14, 5 to 14, 6 to 14, 7 to 14, 8 to 14, 9 to 14, 10 to 14, 11 to 14, 12 to 14, 13 to 14, 2 to 13, 3 to 13, 4 to 13, 5 to 13, 6 to 13, 7 to 13, 8 to 13, 9 to 13, 10 to 13, 11 to 13, 12 to 13, 2 to 12, 3 to 12, 4 to 12, 5 to 12, 6 to 12, 7 to 12, 8 to 12, 9 to 12, 10 to 12, 11 to 12, 2 to 12, 3 to 12, 4 to 12, 5 to 12, 6 to 12, 7 to 12, 8 to 12, 9 to 12, 10 to 12, 11 to 12, 2 to 10, 3 to 10, 4 to 10, 5 to 10, 6 to 10, 7 to 10, 8 to 10, 9 to 10, 2 to 10, 3 to 10, 4 to 10, 5 to 10, 6 to 10, 7 to 10, 8 to 10, 9 to 10, 2 to 8, 3 to 8, 4 to 8, 5 to 8, 6 to 8, 7 to 8, 2 to 6, 3 to 6, 4 to 6, 5 to 6, 2 to 4, or 3 to 4 oxalate-metabolizing strains of microbes. In some embodiments, the plurality of active microbes comprises 3 strains of oxalate-metabolizing microbes. In some embodiments the plurality of active microbes consists of 3 strains of oxalate-metabolizing microbes.

[0130] In some embodiments, the plurality of active microbes that metabolize oxalate may comprise one or more microbial species selected from, but not limited to Oxalobacter formigenes, Bifidobacterium sp., Bifidobacterium dentium, Dialister invisus, Lactobacillus acidophilus, Lactobacillus gasseri, Lactobacillus helveticus, Lactobacillus reuteri, Eggerthella lenta, Lactobacillus rhamnosus, Enterococcus faecalis, Enterococcus gallinarum, Enterococcus faecium, Providencia rettgeri, Streptococcus thermophilus, Lactobacillus plantarum, Lactobacillus casei, Lactobacillus salivarius, Lactobacillus johnsii, Bifidobacterium infantis, Bifidobacterium animalis, Clostridium sporogenes, Leuconostoc lactis, Leuconostoc mesenteroides.

[0131] In some embodiments the plurality of active microbes that metabolize oxalate may comprise two or more microbial species selected from, but not limited to, Bifidobacterium dentium ATCC 27678, Enterococcus faecalis HM-432, Lactobacillus helveticus DSM 20075, Bifidobacterium dentium ATCC 27680, Lactobacillus acidophilus ATCC 4357, Lactobacillus reuteri HM-102, Bifidobacterium dentium DSM 20221, Lactobacillus acidophilus DSM 20079, Lactobacillus rhamnosus ATCC 53103, Bifidobacterium dentium DSM 20436, Lactobacillus acidophilus DSM 20242, Lactobacillus rhamnosus DSM 20245, Bifidobacterium sp. HM-868, Lactobacillus gasseri ATCC 33323, Lactobacillus rhamnosus DSM 8746, Dialister invisus DSM 15470, Lactobacillus gasseri DSMZ 107525, Lactobacillus rhamnosus HM-106, Eggerthella lenta ATCC 43055, Lactobacillus gasseri DSMZ 20077, Oxalobacter formigenes ATCC 35274, Eggerthella lenta DSM 2243, Lactobacillus gasseri HM-104, Oxalobacter formigenes DSM 4420, Enterococcus faecalis HM-202, Lactobacillus gasseri HM-644, and Oxalobacter formigenes HM-1.

[0132] In some embodiments, the plurality of active microbes comprises an Oxalobacter formigenes strain having a 16S sequence at least 80% identical to SEQ ID NO: 67, SEQ ID NO: 133, or SEQ ID NO:289. In some embodiments, the plurality of active microbes comprises an Oxalobacter formigenes strain having a 16S sequence at least 90%, at least 91%, at least 92%, at least 93%, at least 94%, at least 95%, at least 96%, at least 97%, at least 98%, or at least 99% identical to SEQ ID NO: 67, SEQ ID NO: 133, or SEQ ID NO:289.

[0133] In some embodiments the plurality of active microbes comprises an Oxalobacter formigenes strain having a 16S sequence at least 80% identical to SEQ ID NO: 67 and an Oxalobacter formigenes strain having a 16S sequence at least 80% identical to SEQ ID NO: 133. In some embodiments, the plurality of active microbes comprises an Oxalobacter formigenes strain having a 16S sequence at least 90%, at least 91%, at least 92%, at least 93%, at least 94%, at least 95%, at least 96%, at least 97%, at least 98%, or at least 99%, identical to SEQ ID NO: 67 and an Oxalobacter formigenes strain having a 16S sequence at least 90%, at least 91%, at least 92%, at least 93%, at least 94%, at least 95%, at least 96%, at least 97%, at least 98%, or at least 99% identical to SEQ ID NO: 133.

[0134] In some embodiments the plurality of active microbes comprises an Oxalobacter formigenes strain having a 16S sequence at least 80% identical to SEQ ID NO: 133 and an Oxalobacter formigenes strain having a 16S sequence at least 80% identical to SEQ ID NO: 289. In some embodiments, the plurality of active microbes comprises an Oxalobacter formigenes strain having a 16S sequence at least 90%, at least 91%, at least 92%, at least 93%, at least 94%, at least 95%, at least 96%, at least 97%, at least 98%, or at least 99% identical to SEQ ID NO: 133 and an Oxalobacter formigenes strain having a 16S sequence at least 90%, at least 91%, at least 92%, at least 93%, at least 94%, at least 95%, at least 96%, at least 97%, at least 98%, or at least 99% identical to SEQ ID NO: 289.

[0135] In some embodiments the plurality of active microbes comprises an Oxalobacter formigenes strain having a 16S sequence at least 80% identical to SEQ ID NO: 67 and an Oxalobacter formigenes strain having a 16S sequence at least 80% identical to SEQ ID NO: 289. In some embodiments, the plurality of active microbes comprises an Oxalobacter formigenes strain having a 16S sequence at least 90%, at least 91%, at least 92%, at least 93%, at least 94%, at least 95%, at least 96%, at least 97%, at least 98%, or at least 99% identical to SEQ ID NO: 67 and an Oxalobacter formigenes strain having a 16S sequence at least 90%, at least 91%, at least 92%, at least 93%, at least 94%, at least 95%, at least 96%, at least 97%, at least 98%, or at least 99% identical to SEQ ID NO: 289.

[0136] In some embodiments the plurality of active microbes comprises an Oxalobacter formigenes strain having a 16S sequence at least 80% identical to SEQ ID NO: 67, an Oxalobacter formigenes strain having a 16S sequence at least 80% identical to SEQ ID NO: 133, and an Oxalobacter formigenes strain having a 16S sequence at least 80% identical to SEQ ID NO: 289. In some embodiments the plurality of active microbes comprises an Oxalobacter formigenes strain having a 16S sequence at least 90%, at least 91%, at least 92%, at least 93%, at least 94%, at least 95%, at least 96%, at least 97%, at least 98%, or at least 99% identical to SEQ ID NO: 67, an Oxalobacter formigenes strain having a 16S sequence at least 90%, at least 91%, at least 92%, at least 93%, at least 94%, at least 95%, at least 96%, at least 97%, at least 98%, or at least 99% identical to SEQ ID NO: 133, and an Oxalobacter formigenes strain having a 16S sequence at least 90%, at least 91%, at least 92%, at least 93%, at least 94%, at least 95%, at least 96%, at least 97%, at least 98%, or at least 99% identical to SEQ ID NO: 289.

[0137] In some embodiments the plurality of active microbes consists of an Oxalobacter formigenes strain having a 16S sequence at least 80% identical to SEQ ID NO: 67, an Oxalobacter formigenes strain having a 16S sequence at least 80% identical to SEQ ID NO: 133, and an Oxalobacter formigenes strain having a 16S sequence at least 80% identical to SEQ ID NO: 289. In some embodiments the plurality of active microbes consists of an Oxalobacter formigenes strain having a 16S sequence at least 90%, at least 91%, at least 92%, at least 93%, at least 94%, at least 95%, at least 96%, at least 97%, at least 98%, or at least 99% identical to SEQ ID NO: 67, an Oxalobacter formigenes strain having a 16S sequence at least 90%, at least 91%, at least 92%, at least 93%, at least 94%, at least 95%, at least 96%, at least 97%, at least 98%, or at least 99% identical to SEQ ID NO: 133, and an Oxalobacter formigenes strain having a 16S sequence at least 90%, at least 91%, at least 92%, at least 93%, at least 94%, at least 95%, at least 96%, at least 97%, at least 98%, or at least 99% identical to SEQ ID NO: 289.

[0138] As used herein, “substantially metabolizing oxalate,” “substantial metabolization of oxalate,” and variants thereof, refer to a statistically significant reduction in the amount of oxalate in an in vitro assay (for example, as described in Example 3). In some embodiments, one or more than one of the plurality of active microbes is capable of substantially metabolizing oxalate at a pH within a range of 4 to 8. For example, in some embodiments, one or more than one of the plurality of active microbes is capable of metabolizing oxalate at a pH within a range of 4 to 8, 4.2 to 8, 4.4 to 8, 4.6 to 8, 4.8 to 8, 5 to 8, 5.2 to 8, 5.4 to 8, 5.6 to 8, 5.8 to 8, 6 to 8, 6.2 to 8, 6.4 to 8, 6.6 to 8, 6.8 to 8, 7 to 8, 7.2 to 8, 7.4 to 8, 7.6 to 8, 7.8 to 8, 4 to 7, 4.2 to 7, 4.4 to 7, 4.6 to 7, 4.8 to 7, 5 to 7, 5.2 to 7, 5.4 to 7, 5.6 to 7, 5.8 to 7, 6 to 7, 6.2 to 7, 6.4 to 7, 6.6 to 7, 6.8 to 7, 4 to 6, 4.2 to 6, 4.4 to 6, 4.6 to 6, 4.8 to 6, 5 to 6, 5.2 to 6, 5.4 to 6, 5.6 to 6, 5.8 to 6, 4 to 6, 4.2 to 6, 4.4 to 6, 4.6 to 6, 4.8 to 6, 5 to 6, 5.2 to 6, 5.4 to 6, 5.6 to 6, or 5.8 to 6.

[0139] In some embodiments, the plurality of active microbes comprises one microbial strain having a significantly different oxalate-metabolizing activity in a standard oxalate metabolizing assay conducted at two pH values differing by at least 1 pH unit and within a pH range of 4 to 8. For example, in some embodiments, one microbial strain has significantly different oxalate-metabolizing activities in a standard oxalate metabolizing assay at pH 4 and pH 8, pH 5 and pH 8, pH 6 and pH 8, pH 7 and pH 8, pH 4 and pH 7, pH 5 and pH 7, pH 6 and pH 7, pH 4 and pH 6, pH 5 and pH 6, or pH 4 and pH 5.

[0140] In some embodiments, oxalate-metabolizing activity is detected using a standard oxalate metabolization assay. For example, in some embodiments, oxalate-metabolizing activity is detected using a colorimetric enzyme assay that measures the activity of oxalate oxidase. In certain embodiments, relative changes in oxalate abundance in culture media inoculated with microbial strains are measured using a commercial oxalate assay kit (e.g., Sigma-Aldrich, Catalog #MAK315). In some embodiments, oxalate-metabolizing activity is detected using liquid chromatography-mass spectrometry (LC-MS/MS). In some embodiments, relative changes in oxalate abundance is compared between the abundance of oxalate at the beginning of incubation (i.e. t=0), and after 2 hours, 4 hours, 6 hours, 8, hours, 10 hours, 12 hours, 14 hours, 16 hours, 18 hours, 24 hours, 30 hours, 36 hours, 48 hours, 60, hours, 72 hours, 84 hours, 96 hours, 120 hours, or 144 hours incubation.

[0141] As used herein, “higher oxalate metabolizing activity” means either an oxalate metabolizing activity of a microbial strain that is higher as compared to an oxalate metabolizing activity of the same microbial strain under different conditions, and/or an oxalate metabolizing activity of a microbial strain that is higher as compared to an oxalate metabolizing activity of a different microbial strain under the same conditions.

[0142] In some embodiments, the plurality of active microbes comprises two microbial strains having significantly different oxalate metabolizing activities. For example, in some embodiments, one of the plurality of active microbes has a significantly higher oxalate metabolizing activity at a lower pH as compared to the oxalate metabolizing activity of another microbial strain in the plurality of active microbes at the same lower pH. In some embodiments, one of the plurality of active microbes has a significantly higher oxalate metabolizing activity at pH 4.0, 4.5, 5.0, 5.5, 6.0, or 6.5 as compared to the oxalate metabolizing activity of another microbial strain in the plurality of active microbes at pH 4.0, 4.5, 5.0, 5.5, 6.0, or 6.5, respectively. In some embodiments, one of the plurality of active microbes has a significantly higher oxalate metabolizing activity at a higher pH as compared to the oxalate metabolizing activity of another microbial strain in the plurality of active microbes at the same higher pH. In some embodiments, one of the plurality of active microbes has a significantly higher oxalate metabolizing activity at pH 7.5, 7.6, 7.7, 7.8, 7.9, or 8.0 as compared to the oxalate metabolizing activity of another microbial strain in the plurality of active microbes at pH 7.5, 7.6, 7.7, 7.8, 7.9, or 8.0, respectively.

[0143] In some embodiments, one of the plurality of active microbes has a significantly higher oxalate metabolizing activity at a lower pH as compared to its oxalate metabolizing activity at a higher pH. For example, in some embodiments one of the plurality of active microbes has a significantly higher oxalate metabolizing activity at pH 4.0, 4.5, 5.0, 5.5, 6.0, or 6.5 than it does at pH 7.5, 7.6, 7.7, 7.8, 7.9, or 8.0. In some embodiments, one of the plurality of active microbes has a significantly higher oxalate metabolizing activity at a higher pH as compared to its oxalate metabolizing activity at a lower pH. For example, in some embodiments one of the plurality of active microbes has a significantly higher oxalate metabolizing activity at pH 7.5, 7.6, 7.7, 7.8, 7.9, or 8.0 than it does at pH 4.0, 4.5, 5.0, 5.5, 6.0, or 6.5.

[0144] In some embodiments, the plurality of active microbes comprises an active microbe having a higher oxalate metabolizing activity at a lower pH and another microbe having a higher oxalate metabolizing activity at a higher pH. For example, in some embodiments, the plurality of active microbes comprises an active microbe having a higher oxalate metabolizing activity at pH 4.0 and another microbe having a higher oxalate metabolizing activity at pH 7.5. In some embodiments, the plurality of active microbes comprises an active microbe having a higher oxalate metabolizing activity at pH 4.0 and another microbe having a higher oxalate metabolizing activity at pH 7.6. In some embodiments, the plurality of active microbes comprises an active microbe having a higher oxalate metabolizing activity at pH 4.0 and another microbe having a higher oxalate metabolizing activity at pH 7.7. In some embodiments, the plurality of active microbes comprises an active microbe having a higher oxalate metabolizing activity at pH 4.0 and another microbe having a higher oxalate metabolizing activity at pH 7.8. In some embodiments, the plurality of active microbes comprises an active microbe having a higher oxalate metabolizing activity at pH 4.0 and another microbe having a higher oxalate metabolizing activity at pH 7.9. In some embodiments, the plurality of active microbes comprises an active microbe having a higher oxalate metabolizing activity at pH 4.0 and another microbe having a higher oxalate metabolizing activity at pH 8.0. In some embodiments, the plurality of active microbes comprises an active microbe having a higher oxalate metabolizing activity at pH 4.5 and another microbe having a higher oxalate metabolizing activity at pH 7.5. In some embodiments, the plurality of active microbes comprises an active microbe having a higher oxalate metabolizing activity at pH 4.5 and another microbe having a higher oxalate metabolizing activity at pH 7.6. In some embodiments, the plurality of active microbes comprises an active microbe having a higher oxalate metabolizing activity at pH 4.5 and another microbe having a higher oxalate metabolizing activity at pH 7.7. In some embodiments, the plurality of active microbes comprises an active microbe having a higher oxalate metabolizing activity at pH 4.5 and another microbe having a higher oxalate metabolizing activity at pH 7.8. In some embodiments, the plurality of active microbes comprises an active microbe having a higher oxalate metabolizing activity at pH 4.5 and another microbe having a higher oxalate metabolizing activity at pH 7.9. In some embodiments, the plurality of active microbes comprises an active microbe having a higher oxalate metabolizing activity at pH 4.5 and another microbe having a higher oxalate metabolizing activity at pH 8.0. In some embodiments, the plurality of active microbes comprises an active microbe having a higher oxalate metabolizing activity at pH 5.0 and another microbe having a higher oxalate metabolizing activity at pH 7.5. In some embodiments, the plurality of active microbes comprises an active microbe having a higher oxalate metabolizing activity at pH 5.0 and another microbe having a higher oxalate metabolizing activity at pH 7.6. In some embodiments, the plurality of active microbes comprises an active microbe having a higher oxalate metabolizing activity at pH 5.0 and another microbe having a higher oxalate metabolizing activity at pH 7.7. In some embodiments, the plurality of active microbes comprises an active microbe having a higher oxalate metabolizing activity at pH 5.0 and another microbe having a higher oxalate metabolizing activity at pH 7.8. In some embodiments, the plurality of active microbes comprises an active microbe having a higher oxalate metabolizing activity at pH 5.0 and another microbe having a higher oxalate metabolizing activity at pH 7.9. In some embodiments, the plurality of active microbes comprises an active microbe having a higher oxalate metabolizing activity at pH 5.0 and another microbe having a higher oxalate metabolizing activity at pH 8.0. In some embodiments, the plurality of active microbes comprises an active microbe having a higher oxalate metabolizing activity at pH 5.5 and another microbe having a higher oxalate metabolizing activity at pH 7.5. In some embodiments, the plurality of active microbes comprises an active microbe having a higher oxalate metabolizing activity at pH 5.5 and another microbe having a higher oxalate metabolizing activity at pH 7.6. In some embodiments, the plurality of active microbes comprises an active microbe having a higher oxalate metabolizing activity at pH 5.5 and another microbe having a higher oxalate metabolizing activity at pH 7.7. In some embodiments, the plurality of active microbes comprises an active microbe having a higher oxalate metabolizing activity at pH 5.5 and another microbe having a higher oxalate metabolizing activity at pH 7.8. In some embodiments, the plurality of active microbes comprises an active microbe having a higher oxalate metabolizing activity at pH 5.5 and another microbe having a higher oxalate metabolizing activity at pH 7.9. In some embodiments, the plurality of active microbes comprises an active microbe having a higher oxalate metabolizing activity at pH 5.5 and another microbe having a higher oxalate metabolizing activity at pH 8.0. In some embodiments, the plurality of active microbes comprises an active microbe having a higher oxalate metabolizing activity at pH 6.0 and another microbe having a higher oxalate metabolizing activity at pH 7.5. In some embodiments, the plurality of active microbes comprises an active microbe having a higher oxalate metabolizing activity at pH 6.0 and another microbe having a higher oxalate metabolizing activity at pH 7.6. In some embodiments, the plurality of active microbes comprises an active microbe having a higher oxalate metabolizing activity at pH 6.0 and another microbe having a higher oxalate metabolizing activity at pH 7.7. In some embodiments, the plurality of active microbes comprises an active microbe having a higher oxalate metabolizing activity at pH 6.0 and another microbe having a higher oxalate metabolizing activity at pH 7.8. In some embodiments, the plurality of active microbes comprises an active microbe having a higher oxalate metabolizing activity at pH 6.0 and another microbe having a higher oxalate metabolizing activity at pH 7.9. In some embodiments, the plurality of active microbes comprises an active microbe having a higher oxalate metabolizing activity at pH 6.0 and another microbe having a higher oxalate metabolizing activity at pH 8.0. In some embodiments, the plurality of active microbes comprises an active microbe having a higher oxalate metabolizing activity at pH 6.5 and another microbe having a higher oxalate metabolizing activity at pH 7.5. In some embodiments, the plurality of active microbes comprises an active microbe having a higher oxalate metabolizing activity at pH 6.5 and another microbe having a higher oxalate metabolizing activity at pH 7.6. In some embodiments, the plurality of active microbes comprises an active microbe having a higher oxalate metabolizing activity at pH 6.5 and another microbe having a higher oxalate metabolizing activity at pH 7.7. In some embodiments, the plurality of active microbes comprises an active microbe having a higher oxalate metabolizing activity at pH 6.5 and another microbe having a higher oxalate metabolizing activity at pH 7.8. In some embodiments, the plurality of active microbes comprises an active microbe having a higher oxalate metabolizing activity at pH 6.5 and another microbe having a higher oxalate metabolizing activity at pH 7.9. In some embodiments, the plurality of active microbes comprises an active microbe having a higher oxalate metabolizing activity at pH 6.5 and another microbe having a higher oxalate metabolizing activity at pH 8.0.

[0145] In some embodiments, one or more than one of the plurality of active microbes is capable of substantially metabolizing oxalate at an oxalate concentration of about 0.75 mM to about 40 mM of oxalate. For example, in some embodiments, one or more than one of the plurality of active microbes is capable of substantially metabolizing oxalate at an oxalate concentration within a range of about 0.75 mM to about 40 mM, of about 1 mM to about 40 mM, of about 2.5 mM to about 40 mM, of about 5 mM to about 40 mM, of about 7.5 mM to about 40 mM, of about 10 mM to about 40 mM, of about 15 mM to about 40 mM, of about 20 mM to about 40 mM, of about 25 mM to about 40 mM, of about 30 mM to about 40 mM, of about 0.75 mM to about 30 mM, of about 1 mM to about 30 mM, of about 2.5 mM to about 30 mM, of about 5 mM to about 30 mM, of about 7.5 mM to about 30 mM, of about 10 mM to about 30 mM, of about 15 mM to about 30 mM, of about 20 mM to about 30 mM, of about 25 mM to about 30 mM, of about 0.75 mM to about 25 mM, of about 1 mM to about 25 mM, of about 2.5 mM to about 25 mM, of about 5 mM to about 25 mM, of about 7.5 mM to about 25 mM, of about 10 mM to about 25 mM, of about 15 mM to about 25 mM, of about 20 mM to about 25 mM, of about 0.75 mM to about 20 mM, of about 1 mM to about 20 mM, of about 2.5 mM to about 20 mM, of about 5 mM to about 20 mM, of about 7.5 mM to about 20 mM, of about 10 mM to about 20 mM, of about 15 mM to about 20 mM, of about 0.75 mM to about 15 mM, of about 1 mM to about 15 mM, of about 2.5 mM to about 15 mM, of about 5 mM to about 15 mM, of about 7.5 mM to about 15 mM, of about 10 mM to about 15 mM, of about 0.75 mM to about 10 mM, of about 1 mM to about 10 mM, of about 2.5 mM to about 10 mM, of about 5 mM to about 10 mM, of about 7.5 mM to about 10 mM, of about 0.75 mM to about 5 mM, of about 1 mM to about 5 mM, of about 2.5 mM to about 5 mM, or of about 0.75 mM to about 1 mM.

[0146] In some embodiments, the plurality of active microbes comprises one microbial strain having a significantly different oxalate-metabolizing activity in a standard in vitro oxalate metabolizing assay (for example, as described in Example 3) at an oxalate concentration as compared to its oxalate-metabolizing activity in a standard in vitro oxalate metabolizing assay conducted at a different oxalate concentration, wherein the difference between the two oxalate concentrations is within 100 fold. For example, in some embodiments, one microbial strain has significantly different oxalate-metabolizing activities in a standard oxalate metabolizing assay conducted at about 0.75 mM oxalate and about 40 mM oxalate, about 1 mM and about 40 mM, about 2.5 mM and about 40 mM, about 5 mM and about 40 mM, about 7.5 mM and about 40 mM, about 10 mM and about 40 mM, about 15 mM and about 40 mM, about 20 mM and about 40 mM, about 25 mM and about 40 mM, about 30 mM and about 40 mM, about 0.75 mM and about 30 mM, about 1 mM and about 30 mM, about 2.5 mM and about 30 mM, about 5 mM and about 30 mM, about 7.5 mM and about 30 mM, about 10 mM and about 30 mM, about 15 mM and about 30 mM, about 20 mM and about 30 mM, about 25 mM and about 30 mM, about 0.75 mM and about 25 mM, about 1 mM and about 25 mM, about 2.5 mM and about 25 mM, about 5 mM and about 25 mM, about 7.5 mM and about 25 mM, about 10 mM and about 25 mM, about 15 mM and about 25 mM, about 20 mM and about 25 mM, about 0.75 mM and about 20 mM, about 1 mM and about 20 mM, about 2.5 mM and about 20 mM, about 5 mM and about 20 mM, about 7.5 mM and about 20 mM, about 10 mM and about 20 mM, about 15 mM and about 20 mM, about 0.75 mM and about 15 mM, about 1 mM and about 15 mM, about 2.5 mM and about 15 mM, about 5 mM and about 15 mM, about 7.5 mM and about 15 mM, about 10 mM and about 15 mM, about 0.75 mM and about 10 mM, about 1 mM and about 10 mM, about 2.5 mM and about 10 mM, about 5 mM and about 10 mM, about 7.5 mM and about 10 mM, about 0.75 mM and about 5 mM, about 1 mM and about 5 mM, about 2.5 mM and about 5 mM, or about 0.75 mM and about 1 mM.

[0147] In some embodiments, the plurality of active microbes comprises two microbial strains having significantly different oxalate metabolizing activities. For example, in some embodiments, one of the plurality of active microbes has a significantly higher oxalate metabolizing activity at a lower concentration of oxalate as compared to the oxalate metabolizing activity of another microbial strain in the plurality of active microbes at the same lower concentration of oxalate. In some embodiments, one of the plurality of active microbes has a significantly higher oxalate metabolizing activity at an oxalate concentration of 0.75 mM, 1 mM, 2.5 mM, 5 mM, or 7.5 mM, as compared to the oxalate metabolizing activity of another microbial strain in the plurality of active microbes at an oxalate concentration of 0.75 mM, 1 mM, 2.5 mM, 5 mM, or 7.5 mM, respectively. In some embodiments, one of the plurality of active microbes has a significantly higher oxalate metabolizing activity at a higher concentration of oxalate as compared to the oxalate metabolizing activity of another microbial strain in the plurality of active microbes at the same higher concentration of oxalate. In some embodiments, one of the plurality of active microbes has a significantly higher oxalate metabolizing activity at an oxalate concentration of 15 mM, 20 mM, 25 mM 30 mM, or 40 mM as compared to the oxalate metabolizing activity of another microbial strain in the plurality of active microbes at an oxalate concentration of 15 mM, 20 mM, 25 mM 30 mM, or 40 mM, respectively.

[0148] In some embodiments, one of the plurality of active microbes has a significantly higher oxalate metabolizing activity at a lower oxalate concentration as compared to its oxalate metabolizing activity at a higher oxalate concentration. For example, in some embodiments one of the plurality of active microbes has a significantly higher oxalate metabolizing activity at 0.75 mM, 1 mM, 2.5 mM, 5 mM, or 7.5 mM of oxalate than it does at 15 mM, 20 mM, 25 mM 30 mM, or 40 mM of oxalate. In some embodiments, one of the plurality of active microbes has a significantly higher oxalate metabolizing activity at a higher oxalate concentration as compared to its oxalate metabolizing activity at a lower oxalate concentration. For example, in some embodiments one of the plurality of active microbes has a significantly higher oxalate metabolizing activity at 15 mM, 20 mM, 25 mM 30 mM, or 40 mM of oxalate than it does at 0.75 mM, 1 mM, 2.5 mM, 5 mM, or 7.5 mM of oxalate.

[0149] In some embodiments, the plurality of active microbes comprises an active microbe having a higher oxalate metabolizing activity at a lower concentration of oxalate and another microbe having a higher oxalate metabolizing activity at a higher concentration of oxalate. For example, in some embodiments, the plurality of active microbes comprises an active microbe having a higher oxalate metabolizing activity at about 0.75 mM oxalate and another active microbe having a higher oxalate metabolizing activity at about 40 mM oxalate. In some embodiments, the plurality of active microbes comprises an active microbe having a higher oxalate metabolizing activity at 1 mM oxalate and another active microbe having a higher oxalate metabolizing activity at about 40 mM oxalate. In some embodiments, the plurality of active microbes comprises an active microbe having a higher oxalate metabolizing activity at 2.5 mM oxalate and another active microbe having a higher oxalate metabolizing activity at about 40 mM oxalate. In some embodiments, the plurality of active microbes comprises an active microbe having a higher oxalate metabolizing activity at 5 mM oxalate and another active microbe having a higher oxalate metabolizing activity at about 40 mM oxalate. In some embodiments, the plurality of active microbes comprises an active microbe having a higher oxalate metabolizing activity at 7.5 mM oxalate and another active microbe having a higher oxalate metabolizing activity at about 40 mM oxalate. In some embodiments, the plurality of active microbes comprises an active microbe having a higher oxalate metabolizing activity at 0.75 mM oxalate and another active microbe having a higher oxalate metabolizing activity at about 30 mM oxalate. In some embodiments, the plurality of active microbes comprises an active microbe having a higher oxalate metabolizing activity at 1 mM oxalate and another active microbe having a higher oxalate metabolizing activity at about 30 mM oxalate. In some embodiments, the plurality of active microbes comprises an active microbe having a higher oxalate metabolizing activity at 2.5 mM oxalate and another active microbe having a higher oxalate metabolizing activity at about 30 mM oxalate. In some embodiments, the plurality of active microbes comprises an active microbe having a higher oxalate metabolizing activity at 5 mM oxalate and another active microbe having a higher oxalate metabolizing activity at about 30 mM oxalate. In some embodiments, the plurality of active microbes comprises an active microbe having a higher oxalate metabolizing activity at 7.5 mM oxalate and another active microbe having a higher oxalate metabolizing activity at about 30 mM oxalate. In some embodiments, the plurality of active microbes comprises an active microbe having a higher oxalate metabolizing activity at 0.75 mM oxalate and another active microbe having a higher oxalate metabolizing activity at about 25 mM oxalate. In some embodiments, the plurality of active microbes comprises an active microbe having a higher oxalate metabolizing activity at 1 mM oxalate and another active microbe having a higher oxalate metabolizing activity at about 25 mM oxalate. In some embodiments, the plurality of active microbes comprises an active microbe having a higher oxalate metabolizing activity at 2.5 mM oxalate and another active microbe having a higher oxalate metabolizing activity at about 25 mM oxalate. In some embodiments, the plurality of active microbes comprises an active microbe having a higher oxalate metabolizing activity at 5 mM oxalate and another active microbe having a higher oxalate metabolizing activity at about 25 mM oxalate. In some embodiments, the plurality of active microbes comprises an active microbe having a higher oxalate metabolizing activity at 7.5 mM oxalate and another active microbe having a higher oxalate metabolizing activity at about 25 mM oxalate. In some embodiments, the plurality of active microbes comprises an active microbe having a higher oxalate metabolizing activity at 0.75 mM oxalate and another active microbe having a higher oxalate metabolizing activity at about 20 mM oxalate. In some embodiments, the plurality of active microbes comprises an active microbe having a higher oxalate metabolizing activity at 1 mM oxalate and another active microbe having a higher oxalate metabolizing activity at about 20 mM oxalate. In some embodiments, the plurality of active microbes comprises an active microbe having a higher oxalate metabolizing activity at 2.5 mM oxalate and another active microbe having a higher oxalate metabolizing activity at about 20 mM oxalate. In some embodiments, the plurality of active microbes comprises an active microbe having a higher oxalate metabolizing activity at 5 mM oxalate and another active microbe having a higher oxalate metabolizing activity at about 20 mM oxalate. In some embodiments, the plurality of active microbes comprises an active microbe having a higher oxalate metabolizing activity at 7.5 mM oxalate and another active microbe having a higher oxalate metabolizing activity at about 20 mM oxalate. In some embodiments, the plurality of active microbes comprises an active microbe having a higher oxalate metabolizing activity at 0.75 mM oxalate and another active microbe having a higher oxalate metabolizing activity at about 15 mM oxalate. In some embodiments, the plurality of active microbes comprises an active microbe having a higher oxalate metabolizing activity at 1 mM oxalate and another active microbe having a higher oxalate metabolizing activity at about 15 mM oxalate. In some embodiments, the plurality of active microbes comprises an active microbe having a higher oxalate metabolizing activity at 2.5 mM oxalate and another active microbe having a higher oxalate metabolizing activity at about 15 mM oxalate. In some embodiments, the plurality of active microbes comprises an active microbe having a higher oxalate metabolizing activity at 5 mM oxalate and another active microbe having a higher oxalate metabolizing activity at about 15 mM oxalate. In some embodiments, the plurality of active microbes comprises an active microbe having a higher oxalate metabolizing activity at 7.5 mM oxalate and another active microbe having a higher oxalate metabolizing activity at about 15 mM oxalate.

[0150] In some embodiments, when tested in an in vitro oxalate metabolization assay (e.g., as described in Example 3 below), a plurality of active microbes of the present invention significantly reduces the concentration of oxalate present in a sample by at least 20%, by at least 30%, by at least 40%, by at least 50%, by at least 60%, by at least 70%, or by at least 80%.

[0151] In some embodiments, a plurality of active microbes of the present invention significantly reduces the concentration of oxalate present in a sample of blood, serum, bile, stool, or urine when administered to a subject by at least 20%, by at least 30%, by at least 40%, by at least 50%, by at least 60%, by at least 70%, or by at least 80% as compared to an untreated control subject or pre-administration levels. Concentrations of oxalate in a blood, serum, bile, stool or urine sample can be measured using a liquid chromatography-mass spectrometry (LC-MS), method as described in Example 4, below.

### Bile Salt Modifying Active Microbes

[0152] Unconjugated primary bile acids, cholic acid (CA) and chenodeoxycholic acid (CDCA), are substrates for 7α-dehydroxylation by select members of the gut microbiota. As shown below, 7α-dehydroxylation converts CA and CDCA to lithocholic acid (LCA) and deoxycholic acid (DCA), respectively. LCA and DCA are secondary bile acids that have been implicated in adverse health outcomes.

[chemical structure]

[0153] In some embodiments, a microbial consortium disclosed herein comprises microbial strains having robust 3α-hydroxysteroid dehydrogenase (3α-HSDH) and 3β-hydroxysteroid dehydrogenase (3β-HSDH) activity. As shown below, 3α-HSDH and 3β-HSDH convert DCA and LCA into alternative secondary bile acids isoDCA and isoLCA, respectively.

[chemical structure]

[0154] In some embodiments, microbial consortia provided herein comprise a plurality of active microbes expressing 3α-HSDH selected from one or more of Eggerthella lenta, Ruminococcus gnavus, Clostridium perfringens, Peptostreptococcus productus, and Clostridium scindens. In some embodiments, microbial consortia provided herein comprise a plurality of active microbes expressing 3β-HSDH selected from one or more of Peptostreptococcus productus, Clostridium innocuum, and Clostridium scindens.

[0155] In some embodiments, the plurality of active microbes comprises one or more than one microbial strain selected from: an Eggethella lenta strain having a 16S sequence at least 80% identical to SEQ ID NO: 30, an Eggethella lenta strain having a 16S sequence at least 80% identical to SEQ ID NO: 96, an Eggethella lenta strain having a 16S sequence at least 80% identical to SEQ ID NO: 170, an Eggethella lenta strain having a 16S sequence at least 80% identical to SEQ ID NO: 201, or a Clostridum scindens strain having a 16S sequence at least 80% identical to SEQ ID NO: 87.

[0156] In some embodiments, the plurality of active microbes comprises one or more than one microbial strain selected from: an Eggethella lenta strain having a 16S sequence at least 90%, at least 91%, at least 92%, at least 93%, at least 94%, at least 95%, at least 96%, at least 97%, at least 98%, or at least 99% identical to SEQ ID NO: 30, an Eggethella lenta strain having a 16S sequence at least 90%, at least 91%, at least 92%, at least 93%, at least 94%, at least 95%, at least 96%, at least 97%, at least 98%, or at least 99% identical to SEQ ID NO: 96, an Eggethella lenta strain having a 16S sequence at least 90%, at least 91%, at least 92%, at least 93%, at least 94%, at least 95%, at least 96%, at least 97%, at least 98%, or at least 99% identical to SEQ ID NO: 170, an Eggethella lenta strain having a 16S sequence at least 90%, at least 91%, at least 92%, at least 93%, at least 94%, at least 95%, at least 96%, at least 97%, at least 98%, or at least 99% identical to SEQ ID NO: 201, or a Clostridum scindens strain having a 16S sequence at least 90%, at least 91%, at least 92%, at least 93%, at least 94%, at least 95%, at least 96%, at least 97%, at least 98%, or at least 99% identical to SEQ ID NO: 87.

[0157] In some embodiments, the plurality of active microbes comprises two microbial strains having significantly different bile acid-metabolizing activities. For example, in some embodiments, one of the plurality of active microbes has a significantly higher bile acid-metabolizing activity at a lower concentration of bile acid as compared to the bile acid-metabolizing activity of another microbial strain in the plurality of active microbes at the same lower concentration of bile acid. In some embodiments, one of the plurality of active microbes has a significantly higher bile acid-metabolizing activity at a bile acid concentration of 0.1 mM, 0.2 mM, 0.3 mM, 0.4 mM, 0.5 mM, 0.6 mM, 0.7 mM, 0.8 mM, 0.9 mM, 1.0 mM, as compared to the bile acid-metabolizing activity of another microbial strain in the plurality of active microbes at an oxalate concentration of 0.1 mM, 0.2 mM, 0.3 mM, 0.4 mM, 0.5 mM, 0.6 mM, 0.7 mM, 0.8 mM, 0.9 mM, or 1.0 mM, respectively. In some embodiments, one of the plurality of active microbes has a significantly higher bile acid-metabolizing activity at a higher concentration of bile acid as compared to the bile acid-metabolizing activity of another microbial strain in the plurality of active microbes at the same higher concentration of bile acid. In some embodiments, one of the plurality of active microbes has a significantly higher bile acid metabolizing activity at a bile acid concentration of 5.0 mM, 5.5 mM, 6.0 mM, 6.5 mM, 7.0 mM, 7.5 mM, 8.0 mM, 8.5 mM, 9.0 mM, 9.5 mM, or 10.0 mM as compared to the oxalate metabolizing activity of another microbial strain in the plurality of active microbes at an oxalate concentration of 5.0 mM, 5.5 mM, 6.0 mM, 6.5 mM, 7.0 mM, 7.5 mM, 8.0 mM, 8.5 mM, 9.0 mM, 9.5 mM, or 10.0 mM, respectively.

[0158] In some embodiments, one of the plurality of active microbes has a significantly higher bile acid-metabolizing activity at a lower bile acid concentration as compared to its bile acid-metabolizing activity at a higher bile acid concentration. For example, in some embodiments one of the plurality of active microbes has a significantly higher bile acid-metabolizing activity at 0.1 mM, 0.2 mM, 0.3 mM, 0.4 mM, 0.5 mM, 0.6 mM, 0.7 mM, 0.8 mM, 0.9 mM, or 1.0 mM of bile acid than it does at. 5.0 mM, 5.5 mM, 6.0 mM, 6.5 mM, 7.0 mM, 7.5 mM, 8.0 mM, 8.5 mM, 9.0 mM, 9.5 mM, or 10.0 mM of bile acid. In some embodiments, one of the plurality of active microbes has a significantly higher bile acid-metabolizing activity at a higher bile acid concentration as compared to its bile acid metabolizing activity at a lower bile acid concentration. For example, in some embodiments one of the plurality of active microbes has a significantly higher bile acid-metabolizing activity at 5.0 mM, 5.5 mM, 6.0 mM, 6.5 mM, 7.0 mM, 7.5 mM, 8.0 mM, 8.5 mM, 9.0 mM, 9.5 mM, or 10.0 mM of bile acid than it does at 0.1 mM, 0.2 mM, 0.3 mM, 0.4 mM, 0.5 mM, 0.6 mM, 0.7 mM, 0.8 mM, 0.9 mM, or 1.0 mM of bile acid.

[0159] In some embodiments, the plurality of active microbes comprises an active microbe having a higher bile acid-metabolizing activity at a lower concentration of bile acid and another microbe having a higher bile acid-metabolizing activity at a higher concentration of bile acid. For example, in some embodiments, the plurality of active microbes comprises an active microbe having a higher bile acid metabolizing activity at about 0.1 mM bile acid and another active microbe having a higher bile acid-metabolizing activity at about 10 mM bile acid. In some embodiments, the plurality of active microbes comprises an active microbe having a higher bile acid metabolizing activity at about 0.2 mM bile acid and another active microbe having a higher bile acid-metabolizing activity at about 10 mM bile acid. In some embodiments, the plurality of active microbes comprises an active microbe having a higher bile acid metabolizing activity at about 0.3 mM bile acid and another active microbe having a higher bile acid-metabolizing activity at about 10 mM bile acid. In some embodiments, the plurality of active microbes comprises an active microbe having a higher bile acid metabolizing activity at about 0.4 mM bile acid and another active microbe having a higher bile acid-metabolizing activity at about 10 mM bile acid. In some embodiments, the plurality of active microbes comprises an active microbe having a higher bile acid metabolizing activity at about 0.5 mM bile acid and another active microbe having a higher bile acid-metabolizing activity at about 10 mM bile acid. In some embodiments, the plurality of active microbes comprises an active microbe having a higher bile acid metabolizing activity at about 0.1 mM bile acid and another active microbe having a higher bile acid-metabolizing activity at about 7.5 mM bile acid. In some embodiments, the plurality of active microbes comprises an active microbe having a higher bile acid metabolizing activity at about 0.2 mM bile acid and another active microbe having a higher bile acid-metabolizing activity at about 7.5 mM bile acid. In some embodiments, the plurality of active microbes comprises an active microbe having a higher bile acid metabolizing activity at about 0.3 mM bile acid and another active microbe having a higher bile acid-metabolizing activity at about 5.0 mM bile acid. In some embodiments, the plurality of active microbes comprises an active microbe having a higher bile acid metabolizing activity at about 0.4 mM bile acid and another active microbe having a higher bile acid-metabolizing activity at about 7.5 mM bile acid. In some embodiments, the plurality of active microbes comprises an active microbe having a higher bile acid metabolizing activity at about 0.5 mM bile acid and another active microbe having a higher bile acid-metabolizing activity at about 7.5 mM bile acid. In some embodiments, the plurality of active microbes comprises an active microbe having a higher bile acid metabolizing activity at about 0.1 mM bile acid and another active microbe having a higher bile acid-metabolizing activity at about 5.0 mM bile acid. In some embodiments, the plurality of active microbes comprises an active microbe having a higher bile acid metabolizing activity at about 0.2 mM bile acid and another active microbe having a higher bile acid-metabolizing activity at about 5.0 mM bile acid. In some embodiments, the plurality of active microbes comprises an active microbe having a higher bile acid metabolizing activity at about 0.3 mM bile acid and another active microbe having a higher bile acid-metabolizing activity at about 5.0 mM bile acid. In some embodiments, the plurality of active microbes comprises an active microbe having a higher bile acid metabolizing activity at about 0.4 mM bile acid and another active microbe having a higher bile acid-metabolizing activity at about 5.0 mM bile acid. In some embodiments, the plurality of active microbes comprises an active microbe having a higher bile acid metabolizing activity at about 0.5 mM bile acid and another active microbe having a higher bile acid-metabolizing activity at about 5.0 mM bile acid.

[0160] In some embodiments, when tested in a standard in vitro bile acid metabolization assay, a plurality of active microbes of the present invention significantly reduces the concentration of lithoholic acid (LCA) and or deoxycholic acid (DCA) present in a sample by at least 20%, by at least 30%, by at least 40%, by at least 50%, by at least 60%, by at least 70%, or by at least 80%.

[0161] In some embodiments, a plurality of active microbes of the present invention significantly reduces the concentration of LCA and/or DCA present in a sample of blood, serum, bile, stool, or urine when administered to a subject by at least 20%, by at least 30%, by at least 40%, by at least 50%, by at least 60%, by at least 70%, or by at least 80% as comparted to an untreated control subject or pre-administration levels.

### Supportive Community of Microbes

[0162] The microbial consortia of the present invention further comprise a supportive community of microbes that enhances one or more than one characteristic of the plurality of active microbes. For example, in some embodiments, the supportive community of microbes enhances gastrointestinal engraftment of the plurality of active microbes. In other embodiments, the supportive community of microbes enhances biomass of the plurality of active microbes. In other embodiments, the supportive community of microbes enhances metabolism of the first metabolic substrate by the plurality of active microbes. In other embodiments, the supportive community of microbes enhances longitudinal stability of the plurality of active microbes.

[0163] The supportive community of microbes disclosed herein metabolize one or more than one metabolite produced by the plurality of active microbes, wherein the one or more than one metabolite inhibits metabolism of the plurality of active microbes. For example, in some embodiments, the supportive community of microbes metabolizes formate produced by the plurality of active microbes, wherein the presence of formate inhibits the metabolism of oxalate by the plurality of active microbes. In some embodiments, the supportive community of microbes of the current invention catalyzes the fermentation of polysaccharides to one or more than one of the group consisting of acetate, acetoin, 2-oxoglutarate, propionate, 1,3-propanediol, succinate, ethanol, lactate, butyrate, 2,3-butanediol, acetone, butanol, formate, H₂, and CO₂. In some embodiments, the supportive community of microbes catalyzes the fermentation of amino acids to one or more than one of the group consisting of acetate, propionate, butanoate, butyrate, isobutyrate, 2-methylbutyrate, isovalerate, isocaproate, 3-phenylpropanoate, phloretate, 3-(1H-indol-3-yl)propanoate, 5-aminopentanoate, H₂, H₂S, and CO₂, In some embodiments, the supportive community catalyzes the synthesis of one or more than one of the group consisting of methane from H₂ and CO₂, methane from formate and H₂, acetate from H₂ and CO₂, acetate from formate and H₂, acetate and sulfide from H₂, CO₂, and sulfate, propionate and CO₂ from succinate, succinate from H₂ and fumarate; synthesis of succinate from formate and fumarate, and butyrate, acetate, H₂, and CO₂ from lactate. In some embodiments, the supportive community of microbes of the current invention catalyzes the deconjugation of conjugated bile acids to produce primary bile acids, the conversion of cholic acid (CA) to 7-oxocholic acid, the conversion of 7-oxocholic acid to 7-beta-cholic acid (7betaCA), the conversion of chenodeoxycholic acid (CDCA) to 7-oxochenodeoxycholic acid, and/or the conversion of 7-oxochenodeoxycholic acid to ursodeoxycholic acid (UDCA).

[0164] The supportive community of microbes of the current invention comprises between one and 300 microbial strains. For example, in some embodiments, the supportive community of microbes comprises between 1 and 300, 5 and 300, 10 and 300, 15 and 300, 20 and 300, 30 and 300, 40 and 300, 50 and 300, 60 and 300, 70 and 300, 80 and 300, 90 and 300, 100 and 300, 110 and 300, 120 and 300, 130 and 300, 140 and 300, 150 and 300, 160 and 300, 170 and 300, 180 and 300, 190 and 300, 200 and 300, 210 and 300, 220 and 300, 230 and 300, 240 and 300, 250 and 300, 260 and 300, 270 and 300, 280 and 300, 290 and 300, 1 and 250, 5 and 250, 10 and 250, 15 and 250, 20 and 250, 30 and 250, 40 and 250, 50 and 250, 60 and 250, 70 and 250, 80 and 250, 90 and 250, 100 and 250, 110 and 250, 120 and 250, 130 and 250, 140 and 250, 150 and 250, 160 and 250, 170 and 250, 180 and 250, 190 and 250, 200 and 250, 210 and 250, 220 and 250, 230 and 250, 240 and 250, 1 and 200, 5 and 200, 10 and 200, 15 and 200, 20 and 200, 30 and 200, 40 and 200, 50 and 200, 60 and 200, 70 and 200, 80 and 200, 90 and 200, 100 and 200, 110 and 200, 120 and 200, 130 and 200, 140 and 200, 150 and 200, 160 and 200, 170 and 200, 180 and 200, 190 and 200, 1 and 150, 5 and 150, 10 and 150, 15 and 150, 20 and 150, 30 and 150, 40 and 150, 50 and 150, 60 and 150, 70 and 150, 80 and 150, 90 and 150, 100 and 150, 110 and 150, 120 and 150, 130 and 150, 140 and 150, 1 and 100, 5 and 100, 10 and 100, 15 and 100, 20 and 100, 30 and 100, 40 and 100, 50 and 100, 60 and 100, 70 and 100, 80 and 100, 90 and 100, 1 and 50, 5 and 50, 10 and 50, 15 and 50, 20 and 50, 30 and 50, or 40 and 50 microbial strains. For example, in some embodiments, the supportive community of microbes comprises about 20 to about 200, about 70 to about 80, about 80 to about 90, about 100 to about 110, or about 150 to about 160 microbial strains.

[0165] In some embodiments, the supportive community of microbes comprises species of at least one, at least two, at least three, at least four, or at least five of the following phyla: Bacteroidetes, Firmicutes, Actinobacteria, Proteobacteria, Verrucomicrobia, and Euryarchaeota. In some embodiments, the supportive community of microbes comprises species of at least one, at least two, at least three, at least four, or at least five of the following subclades: Bacteroidales, Clostridiales, Erysipelotrichales, Negativicutes, Coriobacteriia, Bifidobacteriales, and Methanobacteriales.

[0166] In some embodiments, the supportive community of microbes of the current invention consumes one or more metabolites derived from an animal diet. For example, in some embodiments, the supportive community of microbes of the current invention consumes one or more than one of the following metabolites: a-mannan, acetate, agarose, alanine, arabinan, arabinogalactan, arabinoxylan, arginine, asparagine, aspartate, b-glucans, benzoic acids, carrageenan, catechol, chlorogenic acids, chondroitin sulfate, cysteine, dextran, enterodiol, flavan-3-ols, flavanones, flavones, flavonols, folate, formate, galactomannan, galacturonan, galacturonate, glucomannan, glutamine, glycine, hyaluronan, hydrogen, hydroxyproline, inulin, isoflavones, lactate, laminarin, leucine, levan, methionine, mucin O-linked glycans, phenylalanine, proline, rhamnogalacturonan I, rhamnogalacturonan II, secoisolariciresinol diglucoside, serine, starch, tyrosine, valine, xyloglucan, and xylooligosaccharides. In some embodiments, the supportive community of microbes is designed to maximize the number of metabolites derived from the host diet that the supportive community can consume.

[0167] In some embodiments, the supportive community of microbes of the current invention consumes one or more of the following dietary, host-derived, or microbial metabolites: thiamine, methanol, indole-3-acetate, L-glutamate, L-ornithine, niacin, 2-oxobutyrate, betaine, D-fructuronate, D-gluconate, D-tagaturonate, D-turanose, inosine, glycine, histidine, L-idonate, isoleucine, serine, N-acetyl-D-mannosamine, nitrate, thymidine, uridine, butyrate, propanoate, indole, glutamine, inositol, arginine, aspartate, malate, oxalate, phenol, succinate, ethanol, hydrogen, formate, lactate, aminobenzoate, lyxose, isomaltose, phenylalanine, tyrosine, pyruvate, mannitol, sorbitol, D-tagatose, glycerol, leucine, N-acetylgalactosamine, isovalerate, biotin, isobutyrate, 2-methylbutyrate, D-galactosamine, glycolithocholate, valine, melibiose, taurolithocholate, menaquinone, chenodeoxycholic acid, cholic acid, glycochenodeoxycholate, glycocholate, glycodeoxycholate, thiosulfate, pyridoxal, bicarbonate, N-acetyl-D-glucosamine, sulfate, riboflavin, methionine, N-acetylneuraminic acid, ribose, D-galacturonate, taurochenodeoxycholate, taurocholate, arabinose, rhamnose, pantothenic acid, xylooligosaccharide, acetate, D-glucuronic acid, cysteine, adenosylcobalamin, sucrose, trehalose, urea, xylose, cellobiose, mannose, L-fucose, D-galactose, D-glucosamine, D-psicose, fructooligosaccharide, carbon dioxide, maltose, ammonia, raffinose, dextrin, lactose, glucose, and fructose.

[0168] In some embodiments, the supportive community of microbes of the current invention produces one or more of the following metabolites: dimethylamine, folic acid, butylamine, phenylethylamine, 1,2-propanediol, acetone, trimethylamine, putrescine, tyramine, 4-aminobutyrate, valerate, 1,2-ethanediol, methylamine, phenylacetate, spermidine, hydrogen sulfide, linoleic acid, formaldehyde, trimethylamine N-oxide, cadaverine, alanine, threonine, methane, and pentanol.

[0169] In some embodiments of the invention, an original dosage form of the disclosed microbial consortium comprises active microbes and supportive microbes in a colony forming unit (CFU) ratio of about 5:1, 4:1, 3:1, 2:1, 1:1, 1:2, 1:3, 1:4, 1:5. In some embodiments, an original dosage form of the disclosed microbial consortium comprises active microbes and supportive microbes in total CFU amounts within about one order of magnitude, about two orders of magnitude, about three orders of magnitude, about four orders of magnitude, about 5 orders of magnitude, about 6 orders of magnitude, about 7 orders of magnitude, about 8 orders of magnitude, about 9 orders of magnitude, or about 10 orders of magnitude of each other.

[0170] In some embodiments, the supportive community of microbes may comprise one or more than one microbial strains selected from, but not limited to, Absiella dolichum, Bacteroides uniformis, Eubacterium siraeum, Acidaminococcus fermentans, Bacteroides vulgatus, Eubacterium ventriosum, Acidaminococcus sp., Bacteroides xylanisolvens, Faecalibacterium prausnitzii, Adlercreutzia equolifaciens, Bifidobacterium breve, Granulicatella adiacens, Akkermansia mucimphila, Bifidobacterium catenulatum, Holdemanella biformis, Alistipes finegoldii, Bifidobacterium pseudocatenulatum, Holdemania filiformis, Alistipes indistinctus, Bilophila wadsworthia, Hungatella hathewayi, Alistipes onderdonkii, Blautia hansenii, Intestinibacter bartlettii, Alistipes putredinis, Blautia hydrogenotrophica, Intestinimonas butyriciproducens, Alistipes senegalensis, Blautia obeum, Lactobacillus ruminis, Alistipes shahii, Blautia sp., Marvinbryantia formatexigens, Anaerobutyricum hallii, Blautia wexlerae, Megasphaera, Anaerofustis stercorihominis, Butyricimonas virosa, Methanobrevibacter smithii, Anaerostipes caccae, Butyrivibrio crossotus, Anaerotruncus colihominis, Catenibacterium mitsuokai, Bacteroides caccae, Clostridium asparagiforme, Bacteroides cellulosilyticus, Clostridium bolteae, Mitsuokella multacida, Bacteroides coprocola, Clostridium hiranonis, Odoribacter splanchnicus, Bacteroides coprophilus, Clostridium hylemonae, Olsenella uli, Bacteroides dorei, Clostridium leptum, Oscillibacter sp., Bacteroides dorei, Clostridium methylpentosum, Parabacteroides distasonis, Bacteroides eggerthii, Clostridium orbiscindens, Parabacteroides johnsonii, Bacteroides finegoldii, Clostridium saccharolyticum, Parabacteroides merdae, Bacteroides fragilis, Clostridium scindens, Parabacteroides sp., Bacteroides intestinalis, Clostridium sp., Prevotella buccalis, Bacteroides ovatus, Prevotella copri, Bacteroides pectinophilus, Roseburia inulinivorans, Bacteroides plebeius, Clostridium spiroforme, Ruminococcus gauvreauii, Bacteroides rodentium, Collinsella aerofaciens, Ruminococcus gnavus, Collinsella stercoris, Ruminococcus lactaris, Coprococcus comes, Ruminococcus torques, Coprococcus eutactus, Slackia exigua, Desulfovibrio piger, Slackia heliotrinireducens, Dorea formicigenerans, Solobacterium moorei, Dorea longicatena, Streptococcus salivarius subsp. Thermophilus, Bacteroides stercoris, Ethanoligenens harbinense, Subdoligranulum variabile, Bacteroides thetaiotaomicron, Eubacterium rectale, Turicibacter sanguinis, and Tyzzerella nexilis.

[0171] In some embodiments the supportive community of microbes may comprise one or more than one microbial strains selected from, but not limited to, Absiella dolichum DSM 3991, Bilophila wadsworthia ATCC 49260, Intestinibacter bartlettii DSM 16795, Acidaminococcus fermentans DSM 20731, Bilophila wadsworthia DSM 11045, Intestinimonas butyriciproducens DSM 26588, Acidaminococcus sp. HM-81, Blautia hansenii DSM 20583, Lactobacillus amylovorus DSM 20552, Adlercreutzia equolifaciens DSM 19450, Blautia hydrogenotrophica DSM 10507, Lactobacillus casei subsp. casei ATCC 393, Akkermansia muciniphila ATCC BAA-835, Blautia obeum DSMZ 25238, Lactobacillus casei subsp. casei ATCC 39539, Alistipes finegoldii DSM 17242, Blautia sp. HM-1032, Lactobacillus crispatus HM-370, Alistipes indistinctus DSM 22520, Blautia wexlerae DSM 19850, Lactobacillus johnsonii HM-643, Alistipes onderdonkii DSM 19147, Butyricimonas virosa DSM 23226, Lactobacillus parafarraginis HM-478, Alistipes putredinis DSM 17216, Butyrivibrio crossotus DSM 2876, Lactobacillus plantarum ATCC 14917, Alistipes senegalensis DSM 25460, Catenibacterium mitsuokai DSM 15897, Lactobacillus plantarum ATCC 202195, Alistipes shahii DSM 19121, Cetobacterium somerae DSM 23941, Lactobacillus ruminis ATCC 25644, Anaerobutyricum hallii DSM 3353, Clostridium asparagiforme DSM 15981, Lactobacillus ruminis DSM 20404, Anaerococcus lactolyticus DSM 7456, Clostridium bolteae DSM 15670, Lactobacillus ultunensis DSM 16048, Anaerofustis stercorihominis DSM 17244, Clostridium bolteae HM-1038, Lactococcus lactis Berridge DSM 20729, Anaerostipes caccae DSM 14662, Clostridium bolteae HM-318, Marvinbryantia formatexigens DSM 14469, Anaerotruncus colihominis DSM 17241, Clostridium cadaveris HM-1040, Megasphaera indica DSM 25562, Bacteroides caccae ATCC 43185, Clostridium citroniae HM-315, Megasphaera sp. DSM 102144, Bacteroides caccae HM-728, Clostridium hiranonis DSM 13275, Methanobrevibacter smithii DSM 11975, Bacteroides cellulosilyticus DSM 14838, Clostridium hylemonae DSM 15053, Methanobrevibacter smithii DSM 2374, Bacteroides cellulosilyticus HM-726, Clostridium innocuum HM-173, Methanobrevibacter smithii DSM 2375, Bacteroides coprocola DSM 17136, Clostridium leptum DSM 753, Methanobrevibacter smithii DSM 861, Bacteroides coprophilus DSM 18228, Clostridium methylpentosum DSM 5476, Methanomassiliicoccus luminyensis DSM 25720, Bacteroides dorei DSM 17855, Clostridium saccharolyticum DSM 2544, Methanosphaera stadtmanae DSMZ 3091, Bacteroides dorei HM-29, Clostridium scindens DSM 5676, Mitsuokella multacida DSM 20544, Bacteroides dorei HM-718, Clostridium scindens VPI 12708, Odoribacter splanchnicus DSM 20712, Bacteroides eggerthii DSM 20697, Clostridium sp. ATCC 29733, Olsenella uli DSM 7084, Bacteroides eggerthii HM-210, Clostridium sp. DSM 4029, Oscillibacter sp. HM-1030, Bacteroides finegoldii DSM 17565, Clostridium sp. HM-634, Parabacteroides distasonis ATCC 8503, Bacteroides finegoldii HM-727, Clostridium sp. HM-635, Parabacteroides goldsteinii HM-1050, Bacteroides fragilis HM-20, Clostridium spiroforme DSM 1552, Parabacteroides johnsonii DSM 18315, Bacteroides fragilis HM-709, Clostridium sporogenes ATCC 15579, Parabacteroides johnsonii HM-731, Bacteroides fragilis HM-710, Clostridium sporogenes ATCC 17889, Parabacteroides merdae DSM 19495, Bacteroides intestinalis DSM 17393, Clostridium sporogenes DSM 767, Parabacteroides merdae HM-729, Bacteroides ovatus ATCC 8483, Clostridium symbiosum HM-309, Parabacteroides merdae HM-730, Bacteroides ovatus HM-222, Clostridium symbiosum HM-319, Parabacteroides sp. HM-77, Bacteroides pectinophilus ATCC 43243, Collinsella aerofaciens ATCC 25986, Peptostreptococcus anaerobius DSM 2949, Bacteroides plebeius DSM 17135, Collinsella stercoris DSM 13279, Prevotella buccae HM-45, Bacteroides rodentium DSM 26882, Coprococcus catus ATCC 27761, Prevotella buccalis DSM 20616, Bacteroides salyersiae HM-725, Coprococcus comes ATCC 27758, Prevotella copri DSM 18205, Bacteroides sp. HM-18, Coprococcus eutactus ATCC 27759, Proteocatella sphenisci DSM 23131, Bacteroides sp. HM-19, Coprococcus eutactus ATCC 51897, Providencia rettgeri ATCC BAA-2525, Bacteroides sp. HM-23, Coprococcus sp. DSM 21649, Roseburia intestinalis DSM 14610, Bacteroides sp. HM-27, Desulfovibrio piger ATCC 29098, Roseburia inulinivorans DSM 16841, Bacteroides sp. HM-28, Dialister pneumosintes ATCC 51894, Ruminococcaceae sp. HM-79, Bacteroides sp. HM-58, Dorea formicigenerans ATCC 27755, Ruminococcus albus ATCC 27210, Bacteroides stercoris DSM 19555, Dorea longicatena DSM 13814, Ruminococcus bromii ATCC 27255, Bacteroides stercoris HM-1036, Eggerthella sp. DSM 11767, Ruminococcus bromii ATCC 51896, Bacteroides thetaiotaomicron ATCC 29148, Eggerthella sp. DSM 11863, Ruminococcus gauvreauii DSM 19829, Bacteroides uniformis ATCC 8492, Eggerthella sp. HM-1099, Ruminococcus gnavus ATCC 29149, Bacteroides vulgatus ATCC 8482, Ethanoligenens harbinense DSM 18485, Ruminococcus gnavus DSM 108212, Bacteroides vulgatus HM-720, Eubacterium eligens ATCC 27750, Ruminococcus gnavus HM-1056, Bacteroides xylanisolvens DSM 18836, Eubacterium rectale ATCC 33656, Ruminococcus lactaris ATCC 29176, Bifidobacterium adolescentis HM-633, Eubacterium siraeum DSM 15702, Ruminococcus lactaris HM-1057, Bifidobacterium angulatum HM-1189, Eubacterium ventriosum ATCC 27560, Ruminococcus torques ATCC 27756, Bifidobacterium animalis DSM 20104, Faecalibacterium prausnitzii ATCC 27766, Slackia exigua DSM 15923, Bifidobacterium animalis subsp. Lactis DSMZ 10140, Faecalibacterium prausnitzii ATCC 27768, Slackia heliotrinireducens DSM 20476, Bifidobacterium bifidum ATCC 11863, Faecalibacterium prausnitzii DSM 17677, Solobacterium moorei DSM 22971, Bifidobacterium breve DSM 20213, Faecalibacterium prausnitzii HM-473, Streptococcus salivarius subsp. thermophilus ATCC BAA-491, Bifidobacterium catenulatum DSM 16992, Flavonifractor plautii HM-1044, Streptococcus thermophilus ATCC 14485, Bifidobacterium longum infantis ATCC 55813, Flavonifractor plautii HM-303, Subdoligranulum variabile DSM 15176, Bifidobacterium longum subsp. longum HM-845, Granulicatella adiacens ATCC 49175, Turicibacter sanguinis DSM 14220, Bifidobacterium longum subsp. longum HM-846, Holdemanella biformis DSM 3989, Tyzzerella nexilis DSM 1787, Bifidobacterium longum subsp. longum HM-847, Holdemania filiformis DSM 12042, Veillonella dispar ATCC 17748, Bifidobacterium longum subsp. longum HM-848, Hungatella (prev. Clostridium) hathewayi HM-308, Veillonella sp. HM-49, Bifidobacterium pseudocatenulatum DSM 20438, Hungatella hathewayi DSM 13479, and Veillonella sp. HM-64.

[0172] Conjugated primary bile acids are synthesized in the liver from cholesterol, concentrated and stored in the gallbladder, and secreted into the duodenum to facilitate the solubilization and absorption of dietary lipids. Most bile acids are reabsorbed and recycled back to the liver through enterohepatic recirculation, but a sizable fraction (5%) escapes recycling, enters the large intestine, and is heavily metabolized into secondary bile acids by resident colonic microbes. Through microbial metabolism, four conjugated primary bile acids produced in the liver: taurochenoxycholic acid (TCDCA), glycochenodeoxycholic acid (GCDCA), taurocholic acid (TCA), and glycocholic acid (GCA), can be converted into over 100 molecules that have profound effects on host physiology. The unique profile of molecules produced is dependent on the metabolic capabilities of the resident colonic microbial community. As shown below, the first metabolic step upstream of secondary bile acid production is the deconjugation of conjugated primary bile acids by microbial bile salt hydrolases (BSH).

[chemical structure]

[0173] In some embodiments, the supportive community of microbes may comprise one or more microbial strains having robust and/or redundant BSH activity, so that deconjugation of primary bile acids can occur despite differences in host physiology, diet, plurality of active microbes present in the microbial consortium, or the pre-existing composition of the conjugated bile acid pool.

[0174] In some embodiments, the supportive community of microbes may comprise one or more than one microbial strains selected from, Alistipes indistinctus, Bacteroides ovatus, Bacteroides thetaiotaomicron, Bacteroides uniformis, Bacteroides vulgatus, Bacteroides xylanisolvens, Bifidobacterium angulatum, Bifidobacterium bifidum, Bifidobacterium breve, Bifidobacterium longum infantis, Bifidobacterium pseudocatenulatum, Blautia obeum, Clostridium hylemonae, Enterococcus faecalis, Hungatella hathewayi, Lactobacillus acidophilus, Methanobrevibacter smithii, Parabacteroides distasonis, Parabacteroides goldsteini, Providencia rettgeri, Roseburia inulinivorans, Ruminococcus bromii, Ruminococcus gnavus, and Turicibacter sanguinis.

[0175] In some embodiments, the current disclosure provides a microbial consortium comprising a plurality of active microbes that convert CA and CDCA into alternative secondary bile acids, thereby shifting the bile acid pool away from 7α-dehydroxylation products, LCA and DCA. For example, in some embodiments, a microbial consortium disclosed herein comprises microbial strains having robust 7α-hydroxysteroid dehydrogenase (7α-HSDH) and 7β-hydroxysteroid dehydrogenase (7β-HSDH) activity. As shown below, 7α-HSDH creates 7oxoCA and 7oxoCDCA intermediates, and 7β-HSDH converts CA and CDCA to 7βCA and ursodeoxycholic acid (UDCA).

[chemical structure]

[0176] In some embodiments, microbial consortia provided herein comprise a plurality of active microbes expressing 7α-HSDH selected from one or more of Acinetobacter calcoaceticusi, Bacteroides thetaiotaomicron, Bacteroides intestinalis, Bacteroides fragilis, Eggerthella lenta, Ruminococcus sp. In some embodiments, microbial consortia provided herein comprises a plurality of active microbes expressing 7β-HSDH selected from one or both of Ruminococcus torques and Peptostreptococcus productus.

[0177] Fermenting and Synthesizing Microbes

[0178] In some embodiments, the microbial consortium of the current invention further comprises a fermenting microbe that metabolizes a fermentation substrate to generate one or more than one fermentation product. For example, in some embodiments, the fermentation product is a second metabolic substrate for one or more of the plurality of active microbes. In some embodiments, the fermentation product is a metabolic substrate for one or more of the supportive microbes. In some embodiments, the fermentation substrate is a polysaccharide and the generated fermentation product is one or more than one of acetate, acetoin, 2-oxoglutarate, propionate, 1,3-propanediol, succinate, ethanol, lactate, butyrate, 2,3-butanediol, acetone, butanol, formate, H₂, and CO₂. In some embodiments, the fermentation substrate is an amino acid and the generated fermentation product is one or more than one of acetate, propionate, butanoate, butyrate, isobutyrate, 2-methylbutyrate, isovalerate, isocaproate, 3-phenylpropanoate, phloretate, 3-(1H-indol-3-yl)propanoate, 5-aminopentanoate, H₂, H₂S, and CO₂.

[0179] In some embodiments, the microbial consortium of the current invention further comprises a synthesizing microbe that catalyzes a synthesis reaction that combines the one or more than one metabolite generated by the plurality of active microbes and the one or more than one fermentation product generated by the fermenting microbe to produce one or more than one synthesis product. In some embodiments the fermentation product generated by the fermenting microbe is a third metabolic substrate for the synthesizing microbe. In some embodiments, the one or more than one synthesis product is a second metabolic substrate for the plurality of active microbes. In some embodiments, the one or more than one synthesis product is a fourth metabolic substrate for the fermenting microbe.

[0180] In some embodiments, the synthesizing microbe catalyzes the synthesis of one or more than one of methane from H₂ and CO₂, methane from formate and H₂, acetate from H₂ and CO₂, acetate from formate and H₂, acetate and sulfide from H₂, CO₂, and sulfate, propionate and CO₂ from succinate, succinate from H₂ and fumarate; synthesis of succinate from formate and fumarate, and butyrate, acetate, H₂, and CO₂ from lactate.

[0181] In some embodiments, a fermenting microbe may be for example, but not limited to, Bacteroides thetaiotaomicron or Bactorides vulgatus. In some embodiments, a synthesizing microbe may be for example, but not limited to, Methanobrevibacter smithii or Methanomassiliicoccus luminyensis.

[0182] In some embodiments, the fermenting microbe is selected from a Bacteroides thetaiotaomicron strain having a 16S sequence at least 80% identical to SEQ ID NO: 20, SEQ ID NO: 76, SEQ ID NO: 139, or SEQ ID NO: 280. In some embodiments, the fermenting microbe is selected from a Bacteroides vulgatus strain having a 16S sequence at least 80% identical to SEQ ID NO: 39, SEQ ID NO: 111, SEQ ID NO: 121, SEQ ID NO: 173, SEQ ID NO: 211, SEQ ID NO: 308, SEQ ID NO: 321, or SEQ ID NO: 326. In some embodiments, the synthesizing microbe is selected from a Methanobrevibacter smithii strain having a 16S sequence at least 80% identical to SEQ ID NO: 292.

[0183] In some embodiments, the fermenting microbe is selected from a Bacteroides thetaiotaomicron strain having a 16S sequence at least 90%, at least 91%, at least 92%, at least 93%, at least 94%, at least 95%, at least 96%, at least 97%, at least 98%, or at least 99% identical to SEQ ID NO: 20, SEQ ID NO: 76, SEQ ID NO: 139, or SEQ ID NO: 280. In some embodiments, the fermenting microbe is selected from a Bacteroides vulgatus strain having a 16S sequence at least 90%, at least 91%, at least 92%, at least 93%, at least 94%, at least 95%, at least 96%, at least 97%, at least 98%, or at least 99% identical to SEQ ID NO: 39, SEQ ID NO: 111, SEQ ID NO: 121, SEQ ID NO: 173, SEQ ID NO: 211, SEQ ID NO: 308, SEQ ID NO: 321, or SEQ ID NO: 326. In some embodiments, the synthesizing microbe is selected from a Methanobrevibacter smithii strain having a 16S sequence at least 90%, at least 91%, at least 92%, at least 93%, at least 94%, at least 95%, at least 96%, at least 97%, at least 98%, or at least 99% identical to SEQ ID NO: 292.

[0184] In some embodiments, the microbial consortium disclosed herein comprises active microbes, fermenting microbes and synthesizing microbes in a colony forming unit (CFU) ratio selected from 1:1:1, 1:2:1, 1:1:2, 2:1:1, 2:1:2, 1:3:1, 1:1:3, 3:1:1, 3:1:3, 2:3:2, 2:2:3, 3:2:2, 3:2:3, 1:5:1, 1:1:5, 5:1:1, 5:1:5, 2:5:2, 2:2:5, 5:2:2, 5:2:5, 3:5:3, 3:3:5, 5:3:3, 5:3:5, 4:5:4, 4:4:5, 5:4:4, and 5:4:5. In some embodiments, an original dosage form of the disclosed microbial consortium comprises active microbes, fermenting microbes and synthesizing microbes in total CFU amounts within about one order of magnitude, about two orders of magnitude, about three orders of magnitude, about four orders of magnitude, about 5 orders of magnitude, about 6 orders of magnitude, about 7 orders of magnitude, about 8 orders of magnitude, about 9 orders of magnitude, or about 10 orders of magnitude of each other. In other embodiments, an original dosage form of the disclosed microbial consortium comprises active microbes, fermenting microbes and synthesizing microbes in CFU amounts within about two orders of magnitude of each other. In some embodiments, an original dosage form of the disclosed microbial consortium comprises active microbes and fermenting microbes in total CFU amounts within one order of magnitude, about two orders of magnitude, about three orders of magnitude, about four orders of magnitude, about 5 orders of magnitude, about 6 orders of magnitude, about 7 orders of magnitude, about 8 orders of magnitude, about 9 orders of magnitude, or about 10 orders of magnitude of each other. In some embodiments, an original dosage form of the disclosed microbial consortium comprises active microbes and synthesizing microbes in total CFU amounts within one order of magnitude, about two orders of magnitude, about three orders of magnitude, about four orders of magnitude, about 5 orders of magnitude, about 6 orders of magnitude, about 7 orders of magnitude, about 8 orders of magnitude, about 9 orders of magnitude, or about 10 orders of magnitude of each other. In some embodiments, an original dosage form of the disclosed microbial consortium comprises fermenting microbes and synthesizing microbes in total CFU amounts within one order of magnitude, about two orders of magnitude, about three orders of magnitude, about four orders of magnitude, about 5 orders of magnitude, about 6 orders of magnitude, about 7 orders of magnitude, about 8 orders of magnitude, about 9 orders of magnitude, or about 10 orders of magnitude of each other.

### Microbial Consortia Design

[0185] In some embodiments, microbial consortia disclosed herein are designed to meet one or more than one of the following criteria:
[0186] (i) an ability to eliminate or reduce levels of a first metabolic substrate causing or contributing to a disease in an animal;
[0187] (ii) an ability to metabolize or convert one or more than one metabolite produced by the metabolism of the first metabolic substrate;
[0188] (iii) an ability to metabolize one or more than one nutrient typically found in the human diet;
[0189] (iv) an ability to fulfill unique and potentially beneficial biological functions in the gastrointestinal (GI) tract (e.g., bile salt hydrolase activity or butyrate production);
[0190] (v) an ability to engraft in various biological niches and physical and metabolic compartments of the GI tract of an animal;
[0191] (vi) an ability to increase biomass upon engraftment in the GI tract;
[0192] (vii) an ability to have longitudinal stability in the GI tract of an animal;
[0193] (viii) an ability to increase the flux of a precursor of the first metabolic substrate into a biochemical pathway that converts said precursor into a metabolite that is not the first metabolic substrate;
[0194] (ix) diversity of component microbial species across one or more than one taxonomic phyla; and
[0195] (x) natural prevalence of component microbial species in the GI tract of healthy adults.

[0196] In some embodiments, the microbial consortia of the present invention are designed to comprise a plurality of active microbes capable of metabolizing a first metabolic substrate that causes or contributes to disease in an animal. For example, in some embodiments, the first metabolic substrate may be selected from, but not limited to, oxalate and a bile acid (e.g., lithocholic acid (LCA), deoxycholic acid (DCA)). In some embodiments, the microbial consortium is designed to be capable of metabolizing the first metabolic substrate across a variety of pH ranges found within the GI tract (e.g., pH 4 to 8). In some embodiments, the microbial consortium is designed to be capable of metabolizing the first metabolic substrate in the presence of various concentrations of first metabolic substrate as they exist in different regions of the GI tract.

[0197] For example, in designing which active microbes to include in a microbial consortium for the treatment of primary or secondary hyperoxaluria, an in vitro colorimetric assay (e.g., as described in Example 3 below) can be used to measure the capacity of a candidate microbe to metabolize oxalate in a sample. Microbes capable of reducing the concentration of oxalate present in a sample by at least 20%, by at least 30%, by at least 40%, by at least 50%, by at least 60%, by at least 70%, or by at least 80% can be included in a microbial consortium disclosed herein.

[0198] In other embodiments, an in vivo mouse assay can be used to measure the efficacy of a designed microbial consortium of the present invention in reducing the concentration of oxalate present in a sample of blood, serum, bile, stool, or urine when administered to a subject. Concentrations of oxalate in a blood, serum, bile, stool or urine sample can be measured using a liquid chromatography-mass spectrometry (LC-MS) method as described in Example 4, below. Microbial consortia capable of reducing blood, serum, bile, stool, or urine oxalate levels by at least 20%, by at least 30%, by at least 40%, by at least 50%, by at least 60%, by at least 70%, or by at least 80% as compared to levels in untreated controls or pre-administration levels can be candidates for further evaluation for the treatment of primary or secondary hyperoxaluria.

[0199] In some embodiments, a microbial consortium disclosed herein is designed to metabolize one or more than one metabolite produced by the plurality of active microbes, wherein the one or more than one metabolite inhibits metabolism of the plurality of active microbes. In some embodiments, the microbial consortia are designed to maximize consumption and/or production of a defined set of metabolites using a minimal number of strains. For example, in some embodiments, a microbial consortium is designed to include a microbe that metabolizes formate produced by the plurality of active microbes, wherein the presence of formate inhibits the metabolism of oxalate by the plurality of active microbes, e.g., in a negative feedback loop. In some embodiments, a microbial consortium is designed to include microbes that catalyze the fermentation of polysaccharides to one or more than one of acetate, acetoin, 2-oxoglutarate, propionate, 1,3-propanediol, succinate, ethanol, lactate, butyrate, 2,3-butanediol, acetone, butanol, formate, H₂, and CO₂. In some embodiments, a microbial consortium is designed to catalyze the fermentation of amino acids to one or more than one of acetate, propionate, butanoate, butyrate, isobutyrate, 2-methylbutyrate, isovalerate, isocaproate, 3-phenylpropanoate, phloretate, 3-(1H-indol-3-yl)propanoate, 5-aminopentanoate, H₂, H₂S, and CO₂. In some embodiments, the microbial consortium is designed to catalyze the synthesis of one or more than one of the group consisting of methane from H₂ and CO₂, methane from formate and H₂, acetate from H₂ and CO₂, acetate from formate and H₂, acetate and sulfide from H₂, CO₂, and sulfate, propionate and CO₂ from succinate, succinate from H₂ and fumarate; synthesis of succinate from formate and fumarate, and butyrate, acetate, H₂, and CO₂ from lactate. In some embodiments, the microbial consortium is designed to catalyze the deconjugation of conjugated bile acids to produce primary bile acids, the conversion of cholic acid (CA) to 7-oxocholic acid, the conversion of 7-oxocholic acid to 7-beta-cholic acid (7betaCA), the conversion of chenodeoxycholic acid (CDCA) to 7-oxochenodeoxycholic acid, and/or the conversion of 7-oxochenodeoxycholic acid to ursodeoxycholic acid (UDCA).

[0200] In some embodiments, a microbial consortium disclosed herein is designed to metabolize one or more than one metabolite produced by the plurality of active microbes, wherein the one or more than one metabolite inhibits metabolism of the plurality of active microbes. In some embodiments, the microbial consortia are designed to maximize consumption and/or production of a defined set of metabolites using a minimal number of strains. For example, in some embodiments, a microbial consortium is designed to include a microbe that metabolizes formate produced by the plurality of active microbes, wherein the presence of formate inhibits the metabolism of oxalate by the plurality of active microbes, e.g., in a negative feedback loop. In some embodiments, a microbial consortium is designed to include microbes that catalyze the fermentation of polysaccharides to one or more than one of acetate, propionate, succinate, lactate, butyrate, formate, H₂, and CO₂. In some embodiments, a microbial consortium is designed to catalyze the fermentation of amino acids to one or more than one of acetate, propionate, butyrate, isobutyrate, 2-methylbutyrate, isovalerate, isocaproate, H₂, H₂S, and CO₂. In other embodiments, a microbial consortium is designed to include microbes that catalyze the synthesis of one or more than one of methane from formate and H₂; acetate from H₂ and CO₂; acetate from formate and H₂; acetate and sulfide from H₂, CO₂, and sulfate; propionate and CO₂ from succinate; succinate from H₂ and fumarate; synthesis of succinate from formate and fumarate and butyrate, acetate, H₂, and CO₂ from lactate.

[0201] In some embodiments, microbial consortia are designed to include microbes capable of metabolizing one or more nutrient typically found in a broad spectrum of human diets. For example, in some embodiments, microbial consortia are designed include microbes capable of metabolizing one or more than one of oxalate, fructan, inulin, glucuronoxylan, arabinoxylan, glucomannan, β-mannan, dextran, starch, arabinan, xyloglucan, galacturonan, β-glucan, galactomannan, rhamnogalacturonan I, rhamnogalacturonan II, arabinogalactan, mucin O-linked glycans, yeast α-mannan, yeast β-glucan, chitin, alginate, porphyrin, laminarin, carrageenan, agarose, alternan, levan, xanthan gum, galactooligosaccharides, hyaluronan, chondrointin sulfate, dermatan sulfate, heparin sulfate, keratan sulfate, phenylalanine, tyrosine, tryptophan, leucine, valine, isoleucine, glycine, proline, asparagine, glutamine, aspartate, glutamate, cysteine, lysine, arginine, serine, methionine, alanine, arginine, histidine, ornithine, citrulline, carnitine, hydroxyproline, cholic acid, chenodeoxycholic acid, taurochenodeoxycholic acid, glycochenodeoxycholic acid, cholesterol, cinnamic acid, coumaric acid, sinapinic acid, ferulic acid, caffeic acid, quinic acid, chlorogenic acid, catechin, epicatechin, gallic acid, pyrogallol, catechol, quercetin, myricetin, campherol, luteolin, apigenin, naringenin, and hesperidin. In some embodiments, microbial consortia are designed to enrich for consumption of dietary carbon and energy sources. In other embodiments, microbial consortia are designed to enrich for the production or consumption of host metabolites, including bile acids, sugars, amino acids, vitamins, short-chain fatty acids, and gasses.

[0202] In some embodiments, microbial consortia are designed to include microbes having potentially beneficial biological functions in the GI tract. For example, microbial consortia are designed to include microbial strains having robust and/or redundant bile salt hydrolase (BSH) activity, so that deconjugation of primary bile acids can occur despite differences in host physiology, diet, plurality of active microbes present in the microbial consortium, or the pre-existing composition of the conjugated bile acid pool. In other embodiments, microbial consortia are designed to include microbial strains capable of producing butyrate from the fermentation of dietary fiber in the GI tract, which contributes to intestinal homeostasis, energy metabolism, anti-inflammatory processes, enhancement of intestinal barrier function, and mucosal immunity.

[0203] In some embodiments, microbial consortia described herein are designed to be able to engraft in various biological niches and physical and metabolic compartments of the GI tract of an animal (e.g., a human).

[0204] As used herein, “engraftment” (and grammatical variants thereof, e.g., “engraft”) refers to the ability of a microbial strain or microbial community to establish in one or more niches of the gut of an animal. Operationally, a microbial strain or microbial consortium is “engrafted” if evidence of its establishment, post-administration, can be obtained. In some embodiments, that evidence is obtained by molecular identification (e.g., Matrix-Assisted Laser Desorption/Ionization Time-Of-Flight Mass Spectrometry (MALDI-TOF MS), 16S rRNA sequencing, or genomic sequencing) of a sample obtained from the animal. In some embodiments, the sample is a stool sample. In some embodiments, the sample is a biopsy sample taken from the gut of the animal (e.g., from a location along the gastrointestinal tract of the animal). Engraftment may be transient or may be persistent. In some embodiments, transient engraftment means that the microbial strain or microbial community can no longer be detected in an animal to which it has been administered after the lapse of about 1 week, about 2 weeks, about three weeks, about 1 month, about 2 months, about 3 months, about 4 months, about 6 months, about 8 month, about 10 months, about 1 year, about 1.5 years, or about 2 years.

[0205] For example, microbial consortia are designed to be capable of engrafting into one or more than one niche of the gastrointestinal tract whose composition varies according to a number of environmental factors including, but not limited to, the particular physical compartment of the gastrointestinal tract, the chemical and physicochemical properties of the niche environment (e.g., gastrointestinal motility, pH), the metabolic substrate composition of the niche environment, and other co-inhabiting commensal microbial species. To analyze engraftment of a designed microbial consortium described herein, an in vivo assay can be used as described in Example 8, wherein stool samples from treated mice are analyzed for the presence of specific microbial strains comprising the microbial consortium by whole genome shotgun sequencing of microbial DNA extracted from fecal pellets and sequence reads mapped against a comprehensive database of complete, sequenced genomes of all the defined microbial strains comprising the microbial consortium.

[0206] In some embodiments, a microbial consortium described herein is designed to include microbes that support the growth and increase the biomass of one or more than one other microbe in the consortium when engrafted in the GI tract of an animal (e.g., a human). For example, in some embodiments, microbial consortia are designed to promote co-culturability and/or ecological stability of one or more than one microbial strain of the consortium.

[0207] In some embodiments, a microbial consortium described herein is designed to include one or more than one microbe having longitudinal stability in the GI tract of an animal (e.g., a human) despite transient or long-term changes to the gastrointestinal niche due to modifications in diet, the presence or absence of disease, or other physiological or environmental factors. In some embodiments, longitudinal stability of a community refers to the ability of a microbial consortium to persist (i.e. remain engrafted) in the GI tract of an animal following microbial challenge. In some embodiments, when given sufficient time to permit colonization of microbial challenge strains in the GI tract of an animal engrafted with a microbial consortium, longitudinal stability can be defined as one where at least 50%, at least 60%, at least 70%, at least 80%, at least 90%, at least 95%, at least 96%, at least 97%, at least 98%, or at least 99% of the defined microbial strains are detectable by metagenomic analysis. For example, in some embodiments, metagenomic analysis comprises whole genome shotgun sequencing analysis.

[0208] In other embodiments, longitudinal stability of a community refers to the characteristic of microbial strains comprising a consortium to maintain a metabolic phenotype over a period of time or following microbial challenge. For example, in some embodiments, defined microbial strains comprising a consortium can maintain a metabolic phenotype for at least 1 week, at least 2 weeks, at least 3 weeks, at least 4 weeks, at least 6 weeks, at least 8 weeks, at least 10 weeks, at least 12 weeks, at least 4 months, at least 6 months at least 8 months, at least 10 months, at least 1 year, at least 1.5 years, or at least 2 years.

[0209] In some embodiments, a longitudinal stability can be defined as one where the defined microbial strains comprising a consortium maintain the one or more metabolic phenotype of mucin degradation, polysaccharide fermentation, hydrogen utilization, succinate metabolism, butyrate production, amino acid metabolism, bile acid metabolism, CO₂ fixation, formate metabolism, methanogenesis, acetogenesis, hydrogen production, or propionate production over a period of time or following microbial challenge.

[0210] In some embodiments, a microbial consortium is designed to include one or more than one microbe capable of increasing the flux of a precursor of the first metabolic substrate into a biochemical pathway that converts said precursor into a metabolite that is not the first metabolic substrate. For example, in some embodiments, a microbial consortium can be designed to include microbial strains having robust 7α-HSDH and 7β-HSDH activity, which direct precursors of DCA and LCA first metabolic substrates (CA and CDCA, respectively) down biochemical pathways producing 7betaCA and UDCA.

[0211] In some embodiments, microbial consortia described herein are designed to include representative microbial strains isolated from a healthy donor fecal sample, with the exception of species known to be associated with pathogenesis, which represent microbial species belonging to a diverse array of taxonomic phyla including, Bacteroidetes, Firmicutes, Actinobacteria, Proteobacteria, Verrucomicrobia and Euryarchaeota. In some embodiments, microbial consortia having phylogenetic diversity are less sensitive to perturbations in the GI environment and are more stably engrafted For example, in some embodiments, microbial consortia can be designed to include one or more than one microbial species from Bacteroidetes, Firmicutes, Actinobacteria, Proteobacteria, Verrucomicrobia, or Euryarchaeota.

[0212] In some embodiments, microbial consortia can be designed to include one or more than one microbial species from Bacteroidetes and Firmicutes, Bacteroidetes and Actinobacteria, Bacteroidetes and Proteobacteria, Bacteroidetes and Verrucomicrobia, Bacteroidetes and Euryarchaeota, Firmicutes and Actinobacteria, Firmicutes and Proteobacteria, Firmicutes and Verrucomicrobia, Firmicutes and Euryarchaeota, Actinobacteria and Proteobacteria, Actinobacteria and Verrucomicrobia, Actinobacteria and Euryarchaeota, Proteobacteria and Verrucomicrobia, Proteobacteria and Euryarchaeota, or Verrucomicrobia and Euryarchaeota.

[0213] In some embodiments, microbial consortia can be designed to include one or more than one microbial species from: Bacteroidetes, Firmicutes, and Actinobacteria; Bacteroidetes, Firmicutes, and Proteobacteria; Bacteroidetes, Firmicutes, and Verrucomicrobia; Bacteroidetes, Firmicutes and Euryarchaeota; Bacteroidetes, Actinobacteria, and Proteobacteria; Bacteroidetes, Actinobacteria, and Verrucomicrobia; Bacteroidetes, Actinobacteria, and Euryarchaeota; Bacteroidetes, Proteobacteria, and Verrucomicrobia; Bacteroidetes, Proteobacteria, and Euryarchaeota; Bacteroidetes, Verrucomicrobia, and Euryarchaeota; Firmicutes, Actinobacteria, and Proteobacteria; Firmicuates, Actinobacteria, and Verrucomicrobia; Firmicuates, Actinobacteria, and Euryarchaeota; Firmicuates, Proteobacteria, and Verrucomicrobia; Firmicuates, Proteobacteria, and Euryarchaeota; Firmicutes, Verrucomicrobia, and Euryarchaeota; Actinobacteria, Proteobacteria, and Verrrucomicrobia; Actinobacteria, Proteobacteria, and Euryarchaeota; or Proteobacteria, Verrucomicrobia, and Euryarchaeota.

[0214] In some embodiments, microbial consortia can be designed to include one or more than one microbial species from: Bacteoidetes, Firmicutes, Actinobacteria, and Proteobacteria; Bacteoidetes, Firmicutes, Actinobacteria and Verrucomicrobia; Bacteoidetes, Firmicutes, Actinobacteria, and Euryarchaeota; Bacteroidetes, Actinobacteria, Proteobacteria, and Verrucomicrobia; Bacteroidetes, Actinobacteria, Proteobacteria, and Euryarchaeota; Bacteroidetes, Proteobacteria, Verrucomicrobia, and Euryarchaeota; Firmicutes, Actinobacteria, Proteobacteria, and Verrucomicrobia; Firmicutes, Actinobacteria, Proteobacteria, and Euryarchaeota; Firmicuates, Proteobacteria, Verrucomicrobia, and Euryarchaeota; or Actinobacteria, Proteobacteria, Verrucomicrobia, and Euryarchaeota.

[0215] In some embodiments, microbial consortia can be designed to include one or more than one microbial species from: Bacteoidetes, Firmicutes, Actinobacteria, Proteobacteria, and Verrucomicrobia; Bacteoidetes, Firmicutes, Actinobacteria, Proteobacteria, and Euryarchaeota; Bacteroidetes, Firmicutes, Actinobacteria, Verrucomicrobia, and Euryarchaeota; Bacteoidetes, Firmicutes, Proteobacteria, Verrucomicrobia, and Eurarchaeota; Bacteoidetes, Actinobacteria, Proteobacteria, Verrucomicrobia, and Eurarchaeota; or Firmicutes, Actinobacteria, Proteobacteria, Verrucomicrobia, and Eurarchaeota.

[0216] In some embodiments, microbial consortia can be designed to include one or more than one microbial species from: Bacteoidetes, Firmicutes, Actinobacteria, Proteobacteria, Verrucomicrobia, and Euryarchaeota.

[0217] For example, in some embodiments, a microbial consortium can be designed to include one or more than one Bacteroidetes strain listed in Table 4. In some embodiments, a microbial consortium can be designed to include a Bacteroidetes strain comprising a 16S sequence at least 90%, at least 91%, at least 92%, at least 93%, at least 94%, at least 95%, at least 96%, at least 97%, at least 98%, or at least 99% identical to any one of the Bacteroidetes microbes listed in Table 4. In some embodiments, a microbial consortium can be designed to include a Bacteroidetes strain comprising a 16S sequence at least 80% identical to any one of the Bacteroidetes microbes listed in Table 4.

[0218] In some embodiments, a microbial consortium can be designed to include one or more than one Firmicutes strain listed in Table 4. In some embodiments, a microbial consortium can be designed to include a Firmicutes strain comprising a 16S sequence at least 90%, at least 91%, at least 92%, at least 93%, at least 94%, at least 95%, at least 96%, at least 97%, at least 98%, or at least 99% identical to any one of the Firmicutes microbes listed in Table 4. In some embodiments, a microbial consortium can be designed to include a Firmicutes strain comprising a 16S sequence at least 80% identical to any one of the Firmicutes microbes listed in Table 4.

[0219] In some embodiments, a microbial consortium can be designed to include one or more than one Actinobacteria strain listed in Table 4. In some embodiments, a microbial consortium can be designed to include a Actinobacteria strain comprising a 16S sequence at least 90%, at least 91%, at least 92%, at least 93%, at least 94%, at least 95%, at least 96%, at least 97%, at least 98%, or at least 99% identical to any one of the Actinobacteria microbes listed in Table 4. In some embodiments, a microbial consortium can be designed to include a Actinobacteria strain comprising a 16S sequence at least 80% identical to any one of the Actinobacteria microbes listed in Table 4.

[0220] In some embodiments, a microbial consortium can be designed to include one or more than one Proteobacteria strain listed in Table 4. In some embodiments, a microbial consortium can be designed to include a Proteobacteria strain comprising a 16S sequence at least 90%, at least 91%, at least 92%, at least 93%, at least 94%, at least 95%, at least 96%, at least 97%, at least 98%, or at least 99% identical to any one of the Proteobacteria microbes listed in Table 4. In some embodiments, a microbial consortium can be designed to include a Proteobacteria strain comprising a 16S sequence at least 80% identical to any one of the Proteobacteria microbes listed in Table 4.

[0221] In some embodiments, a microbial consortium can be designed to include one or more than one Verrucomicrobia strain listed in Table 4. In some embodiments, a microbial consortium can be designed to include a Verrucomicrobia strain comprising a 16S sequence at least 90%, at least 91%, at least 92%, at least 93%, at least 94%, at least 95%, at least 96%, at least 97%, at least 98%, or at least 99% identical to any one of the Verrucomicrobia microbes listed in Table 4. In some embodiments, a microbial consortium can be designed to include a Verrucomicrobia strain comprising a 16S sequence at least 80% identical to any one of the Verrucomicrobia microbes listed in Table 4.

[0222] In some embodiments, a microbial consortium can be designed to include Methonobrevibacter smithii. In some embodiments, a microbial consortium can be designed to include a Methonobrevibacter smithii strain comprising a 16S sequence at least 90%, at least 91%, at least 92%, at least 93%, at least 94%, at least 95%, at least 96%, at least 97%, at least 98%, or at least 99% identical to SEQ ID NO: 292. In some embodiments, a microbial consortium can be designed to include a Methonobrevibacter smithii strain comprising a 16S sequence at least 80% identical to SEQ ID NO: 292.

[0223] In some embodiments, a microbial consortium is designed such that when administered to a subject the plurality of active microbes and the supportive community of microbes have one or more than one synergistic effect. For example, in some embodiments administration of a microbial consortium comprising the plurality of active microbes in combination with the supportive community of microbes results in an enhanced metabolization of a first metabolic substrate than achieved by administration of either the plurality of active microbes or supportive community of microbes alone. For example, in some embodiments administration of a microbial consortium results in enhanced oxalate metabolism (e.g., as measured by urinary oxalate levels) in a subject as compared to a subject administered with either a plurality of active microbes or a supportive community of microbes alone. In other embodiments, administration of a microbial consortium results in enhanced conversion of primary bile acids (e.g., DCA and/or LCA) in a subject as compared to a subject administered with either a plurality of active microbes or a supportive community of microbes alone. In some embodiments, a microbial composition comprising the plurality of active microbes in combination with the supportive community of microbes results in enhanced GI engraftment than the engraftment achieved by administration of either the plurality of active microbes or supportive community of microbes alone. In some embodiments, a microbial composition comprising the plurality of active microbes in combination with the supportive community of microbes results in greater biomass in the GI tract than the biomass achieved by administration of either the plurality of active microbes or supportive community of microbes alone. In some embodiments, a microbial composition comprising the plurality of active microbes in combination with the supportive community of microbes results in enhanced longitudinal stability than the stability achieved by administration of either the plurality of active microbes or supportive community of microbes alone. In some embodiments, a microbial composition comprising the plurality of active microbes in combination with the supportive community of microbes results in enhanced clinical efficacy in the treatment of a disease than the efficacy achieved by administration of either the plurality of active microbes or supportive community of microbes alone.

[0224] In some embodiments, a microbial consortium is designed to comprise 20 to 300, 20 to 250, 20 to 200, 20 to 190, 20 to 180, 20 to 170, 20 to 160, 20 to 150, 20 to 140, 20 to 130, 20 to 120, 20 to 110, 20 to 100, 20 to 90, 20 to 80, 20 to 70, 20 to 60, 20 to 50, 50 to 300, 50 to 250, 50 to 200, 50 to 190, 50 to 180, 50 to 170, 50 to 160, 50 to 150, 50 to 140, 50 to 130, 50 to 120, 50 to 110, 50 to 100, 50 to 90, 50 to 80, 50 to 70, 50 to 60, 100 to 300, 100 to 250, 100 to 200, 100 to 190, 100 to 180, 100 to 170, 100 to 160, 100 to 150, 100 to 140, 100 to 130, 100 to 120, 100 to 110, 70 to 80, 80 to 90, or 150 to 160 microbial strains, each comprising a 16S sequence at least 80%, at least 90%, at least 91%, at least 92%, at least 93%, at least 94%, at least 95%, at least 96%, at least 97%, at least 98%, or at least 99% identical to any one of the microbes listed in Table 4.

[0225] In some embodiments, a microbial consortium is designed to comprise 20 to 160, 30 to 160, 40 to 160, 50 to 160, 60 to 160, 70 to 160, 80 to 160, 90 to 160, 100 to 160, 110 to 160, 120 to 160, 130 to 160, 140 to 160, 150 to 160, 20 to 140, 30 to 140, 40 to 140, 50 to 140, 60 to 140, 70 to 140, 80 to 140, 90 to 140, 100 to 140, 110 to 140, 120 to 140, 130 to 140, 20 to 120, 30 to 120, 40 to 120, 50 to 120, 60 to 120, 70 to 120, 80 to 120, 90 to 120, 100 to 120, 110 to 120, 20 to 100, 30 to 100, 40 to 100, 50 to 100, 60 to 100, 70 to 100, 80 to 100, 90 to 100, 20 to 80, 30 to 80, 40 to 80, 50 to 80, 60 to 80, or 70 to 80 microbial strains, each comprising a 16S sequence at least 80%, at least 90%, at least 91%, at least 92%, at least 93%, at least 94%, at least 95%, at least 96%, at least 97%, at least 98%, or at least 99% identical to any one of the microbes listed in Table 22.

[0226] In some embodiments, a microbial consortium is designed to comprise 20 to 104, 40 to 104, 60 to 104, 80 to 104, 100 to 104, 20 to 80, 40 to 80, 60 to 80, 20 to 60, or 40 to 60 microbial strains, each comprising a 16S sequence at least 80%, at least 90%, at least 91%, at least 92%, at least 93%, at least 94%, at least 95%, at least 96%, at least 97%, at least 98%, or at least 99% identical to any one of the microbes listed in Table 23.

[0227] In some embodiments, a microbial consortium is designed to comprise 20 to 104, 40 to 104, 60 to 104, 80 to 104, 100 to 104, 20 to 80, 40 to 80, 60 to 80, 20 to 60, or 40 to 60 microbial strains, each comprising a 16S sequence at least 80%, at least 90%, at least 91%, at least 92%, at least 93%, at least 94%, at least 95%, at least 96%, at least 97%, at least 98%, or at least 99% identical to any one of the microbes listed in Table 24.

[0228] In some embodiments, a microbial consortium is designed to comprise 20 to 158, 30 to 158, 40 to 158, 50 to 158, 60 to 158, 70 to 158, 80 to 158, 90 to 158, 100 to 158, 110 to 158, 120 to 158, 130 to 158, 140 to 158, 150 to 158, 20 to 140, 30 to 140, 40 to 140, 50 to 140, 60 to 140, 70 to 140, 80 to 140, 90 to 140, 100 to 140, 110 to 140, 120 to 140, 130 to 140, 20 to 120, 30 to 120, 40 to 120, 50 to 120, 60 to 120, 70 to 120, 80 to 120, 90 to 120, 100 to 120, 110 to 120, 20 to 100, 30 to 100, 40 to 100, 50 to 100, 60 to 100, 70 to 100, 80 to 100, 90 to 100, 20 to 80, 30 to 80, 40 to 80, 50 to 80, 60 to 80, or 70 to 80 microbial strains, each comprising a 16S sequence at least 80%, at least 90%, at least 91%, at least 92%, at least 93%, at least 94%, at least 95%, at least 96%, at least 97%, at least 98%, or at least 99% identical to any one of the microbes listed in Table 20.

[0229] In some embodiments, a microbial consortium is designed to comprise 20 to 152, 30 to 152, 40 to 152, 50 to 152, 60 to 152, 70 to 152, 80 to 152, 90 to 152, 100 to 152, 110 to 152, 120 to 152, 130 to 152, 140 to 152, 150 to 152, 20 to 140, 30 to 140, 40 to 140, 50 to 140, 60 to 140, 70 to 140, 80 to 140, 90 to 140, 100 to 140, 110 to 140, 120 to 140, 130 to 140, 20 to 120, 30 to 120, 40 to 120, 50 to 120, 60 to 120, 70 to 120, 80 to 120, 90 to 120, 100 to 120, 110 to 120, 20 to 100, 30 to 100, 40 to 100, 50 to 100, 60 to 100, 70 to 100, 80 to 100, 90 to 100, 20 to 80, 30 to 80, 40 to 80, 50 to 80, 60 to 80, or 70 to 80 microbial strains, each comprising a 16S sequence at least 80%, at least 90%, at least 91%, at least 92%, at least 93%, at least 94%, at least 95%, at least 96%, at least 97%, at least 98%, or at least 99% identical to any one of the microbes listed in Table 16.

[0230] In some embodiments, a microbial consortium is designed to comprise 20 to 88, 40 to 88, 60 to 88, 80 to 88, 20 to 80, 40 to 80, 60 to 80, 20 to 60, or 40 to 60 microbial strains, each comprising a 16S sequence at least 80%, at least 90%, at least 91%, at least 92%, at least 93%, at least 94%, at least 95%, at least 96%, at least 97%, at least 98%, or at least 99% identical to any one of the microbes listed in Table 17.

[0231] In some embodiments a microbial consortium is designed to comprise 20 to 89, 40 to 89, 60 to 89, 80 to 89, 20 to 80, 40 to 80, 60 to 80, 20 to 60, or 40 to 60 microbial strains, each comprising a 16S sequence at least 80%, at least 90%, at least 91%, at least 92%, at least 93%, at least 94%, at least 95%, at least 96%, at least 97%, at least 98%, or at least 99% identical to any one of the microbes listed in Table 18.

[0232] In some embodiments, a microbial consortium is designed to comprise 20 to 75, 40 to 75, 60 to 75, 80 to 75, 20 to 60, or 40 to 60 microbial strains, each comprising a 16S sequence at least 80%, at least 90%, at least 91%, at least 92%, at least 93%, at least 94%, at least 95%, at least 96%, at least 97%, at least 98%, or at least 99% identical to any one of the microbes listed in Table 19.

[0233] In some embodiments, a microbial consortium is designed to comprise 2 to 51, 5 to 51, 10 to 51, 20 to 51, 30 to 51, or 40 to 51 Actinobacteria; 10 to 102, 20 to 102, 30 to 102, 40 to 102, 50 to 102, 60 to 102, 70 to 102, 80 to 102, 90 to 102, 10 to 50, 20 to 50, 30 to 50, or 40 to 50 Bacteroidetes; 1 or 2 Euryacrchaeota; 20 to 197, 40 to 197, 60 to 197, 80 to 197, 100 to 197, 120 to 197, 140 to 197, 160 to 197, 180 to 197, 20 to 150, 40 to 150, 60 to 150, 80 to 150, 100 to 150, 120 to 150, 140 to 150, 20 to 100, 40 to 100, 60 to 100, or 80 to 100 Firmicutes; 2 to 24, 8 to 24, 12 to 24, 18 to 24, or 20 to 24 Proteobacteria; and 1 Verrucomicrobia, each comprising a 16S sequence at least 80%, at least 90%, at least 91%, at least 92%, at least 93%, at least 94%, at least 95%, at least 96%, at least 97%, at least 98%, or at least 99% identical to any one of the microbes listed in Table 4.

[0234] In some embodiments, a microbial consortium is designed to comprise 2 to 20, 5 to 20, 10 to 20, or 15 to 20 Actinobacteria; 2 to 48, 10 to 48, 20 to 48, 30 to 48, 40 to 48 Bacteroidetes; 2 to 76, 10 to 76, 20 to 76, 30 to 76, 40 to 76, 50 to 76, 60 to 76, 70 to 76, 2 to 50, 10 to 50, 20 to 50, 30 to 50, 40 to 50 Firmicutes; 2 to 7 Proteobacteria; and 1 Verrucomicrobia, each comprising a 16S sequence at least 80%, at least 90%, at least 91%, at least 92%, at least 93%, at least 94%, at least 95%, at least 96%, at least 97%, at least 98%, or at least 99% identical to any one of the microbes listed in Table 16.

[0235] In some embodiments, a microbial consortium is designed to comprise 2 to 22, 10 to 22, or 20 to 22 Actinobacteria; 2 to 27, 10 to 27, or 20 to 27 Bacteroidetes; 2 to 29, 10 to 29, or 20 to 29 Firmicutes; 1 to 9 Proteobacteria; and 1 Verrucomicrobia, each comprising a 16S sequence at least 80%, at least 90%, at least 91%, at least 92%, at least 93%, at least 94%, at least 95%, at least 96%, at least 97%, at least 98%, or at least 99% identical to any one of the microbes listed in Table 17.

[0236] In some embodiments, a microbial consortium is designed to comprise 2 to 18 or 10 to 18 Actinobacteria; 2 to 27, 10 to 27, or 20 to 27 Bacteroidetes; 2 to 38, 10 to 38, 20 to 38, 30 to 38 Firmicutes; and 2 to 6 Proteobacteria, each comprising a 16S sequence at least 80%, at least 90%, at least 91%, at least 92%, at least 93%, at least 94%, at least 95%, at least 96%, at least 97%, at least 98%, or at least 99% identical to any one of the microbes listed in Table 18.

[0237] In some embodiments, a microbial consortium is designed to comprise 2 to 7 Actinobacteria; 2 to 20 or 10 to 20 Bacteroidetes; 2 to 38, 10 to 38, 20 to 38, or 30 to 38 Firmicutes; 2 to 8 Proteobacteria; and 1 Verrucomicrobia, each comprising a 16S sequence at least 80%, at least 90%, at least 91%, at least 92%, at least 93%, at least 94%, at least 95%, at least 96%, at least 97%, at least 98%, or at least 99% identical to any one of the microbes listed in Table 19.

[0238] In some embodiments, a microbial consortium is designed to comprise 2 to 20 or 10 to 20 Actinobacteria; 2 to 42, 10 to 42, 20 to 42, 30 to 42, or 40 to 42 Bacteroidetes; 2 to 84, 10 to 84, 20 to 84, 30 to 84, 40 to 84, 50 to 84, 60 to 84, 70 to 84, 80 to 84, 2 to 50, 10 to 50, 20 to 50, 30 to 50, or 40 to 50 Firmicutes; 2 to 11 Proteobacteria; and 1 Verrucomicrobia, each comprising a 16S sequence at least 80%, at least 90%, at least 91%, at least 92%, at least 93%, at least 94%, at least 95%, at least 96%, at least 97%, at least 98%, or at least 99% identical to any one of the microbes listed in Table 20.

[0239] In some embodiments, a microbial consortium is designed to comprise 2 to 20 or 10 to 20 Actinobacteria; 2 to 44, 10 to 44, 20 to 44, 30 to 44, or 40 to 44 Bacteroidetes; 1 or 2 Euryarcheota; 2 to 83, 10 to 83, 20 to 83, 30 to 83, 40 to 83, 50 to 83, 60 to 83, 70 to 83, 80 to 83, 2 to 50, 10 to 50, 20 to 50, 30 to 50, or 40 to 50 Firmicutes; 2 to 10 Proteobacteria; and 1 Verrucomicrobia, each comprising a 16S sequence at least 80%, at least 90%, at least 91%, at least 92%, at least 93%, at least 94%, at least 95%, at least 96%, at least 97%, at least 98%, or at least 99% identical to any one of the microbes listed in Table 22.

[0240] In some embodiments, a microbial consortium is designed to comprise 2 to 15 or 10 to 15 Actinobacteria; 2 to 25, 10 to 25, or 20 to 25 Bacteroidetes; 2 to 55, 10 to 55, 20 to 55, 30 to 55, 40 to 55, 50 to 55, 2 to 25, 10 to 25, or 20 to 25 Firmicutes; 2 to 8 Proteobacteria; and 1 Verrucomicrobia, each comprising a 16S sequence at least 80%, at least 90%, at least 91%, at least 92%, at least 93%, at least 94%, at least 95%, at least 96%, at least 97%, at least 98%, or at least 99% identical to any one of the microbes listed in Table 23.

[0241] In some embodiments, a microbial consortium is designed to comprise 2 to 11 Actinobacteria; 2 to 28, 10 to 28, or 20 to 28 Bacteroidetes; 1 Euryarchaeota; 2 to 56, 10 to 56, 20 to 56, 30 to 56, 40 to 56, 50 to 56, 2 to 25, 10 to 25, or 20 to 25 Firmicutes; 2 to 7 Proteobacteria; and 1 Verrucomicrobia, each comprising a 16S sequence at least 80%, at least 90%, at least 91%, at least 92%, at least 93%, at least 94%, at least 95%, at least 96%, at least 97%, at least 98%, or at least 99% identical to any one of the microbes listed in Table 24.

### Isolation and Propagation of Microbial Strains

[0242] Active and supportive microbial strains can be derived from human donor fecal samples, or purchased from the American Type Culture Collection (ATCC; www.atcc.org), the Leibniz institute DSMZ (www.dsmz.de), or BEI Resources (www.beiresources.org). Microbial strains purchased from a depository can be cultured according to depository instructions and microbial strains derived from human donors can be cultured according to the media conditions described in Table 3, below.

[0243] Fecal donors can be selected based on multiple criteria, including a health and medical history questionnaire, physical exam, and blood and stool tests for assessing pathogen-free status. Upon collection of a stool sample from a donor, stool samples can cultured in an anaerobic chamber (5% CO₂, 5% H₂, 90% N₂) and microbial strains isolated by making serial dilution aliquots of the stool samples and plating said aliquots on a variety of microbial cultivation media suitable for growth of anaerobes. Specific enrichment techniques can be performed for species having particular metabolic capabilities, such as consumption or tolerance of oxalate or bile acids. In order to enrich for strains having oxalate metabolism capabilities, aliquots of the serially-diluted stool samples can be plated on agar growth media supplemented with varying concentrations of potassium oxalate (20 mM, 40 mM, 80 mM, 160 mM, or 200 mM). In order to enrich for species capable of metabolizing bile acids, aliquots of serially diluted stool samples can be plated on growth media supplemented with 2% bile. Archaea can be isolated by diluting fecal samples and plating on culture media containing a mixture of antibiotics that is lethal to both gram-positive and gram-negative bacteria. Microbial strain identification can be performed either by 16S rRNA gene sequencing or proteomic fingerprinting using high-throughput Matrix-Assisted Laser Desorption/Ionization Time-Of-Flight Mass Spectrometry (MALDI-TOF MS).

[0244] In some embodiments, methods of producing a microbial consortium described herein comprise individually culturing each of a plurality of active microbes and supportive microbes prior to combining the microbes to form the consortium. In other embodiments, methods of producing a microbial consortium described herein comprise culturing all of a plurality of active microbes and supportive microbes together. In still other embodiments, methods of producing a microbial consortium comprise individually culturing one or more than one microbial strain and co-culturing two or more microbial strains having compatible culture growth conditions, then combining together the individually-cultured microbial strains and co-cultured defined microbial strains to form a microbial consortium. In other embodiments, methods of producing a microbial consortium comprise individually culturing one or more than one microbial strain and co-culturing two or more microbial strains having compatible culture growth conditions, then combining together the individually-cultured microbial strains and co-cultured defined microbial strains to form a microbial consortium.

### Pharmaceutical Compositions

[0245] The present disclosure also provides pharmaceutical compositions that contain an effective amount of a microbial consortium described herein. The composition can be formulated for use in a variety of delivery systems. One or more physiologically acceptable buffer(s) or carrier(s) can also be included in the composition for proper formulation. Suitable formulations for use in the present disclosure are found in Remington's Pharmaceutical Sciences, Mack Publishing Company, Philadelphia, Pa., 17th ed., 1985. For a brief review of methods for drug delivery, see, e.g., Langer (Science 249:1527-1533, 1990).

[0246] In some embodiments, microbial cells of the present invention are harvested by microfiltration and centrifugation. In some embodiments, microfiltration is done with a membrane comprising a nonreactive polymer. For example, in some embodiments, said membrane comprises Polyvinylidene fluoride, Polysulfones, or nitrocellulose. In some embodiments, a membrane for microfiltration has a pore size of approximately 0.2 to 0.45 μm. In some embodiments, the cells are centrifuged at approximately 1000 to 30000, 5000 to 30000, 10000 to 30000, 15000 to 30000, 20000 to 30000, 25000 to 30000, 1000 to 25000, 5000 to 25000, 10000 to 25000, 15000 to 25000, 20000 to 25000, 1000 to 20000, 5000 to 20000, 10000 to 20000, 15000 to 20000, 1000 to 15000, 5000 to 15000, 10000 to 15000, 1000 to 10000, 5000 to 10000, 1000 to 5000 g force. In some embodiments, the cells are concentrated to approximately 1×10⁶ to 1×10¹², 1×10⁷ to 1×10¹², 1×10⁸ to 1×10¹², 1×10⁹ to 1×10¹², 1×10¹⁰ to 1×10¹², 1×10¹¹ to 1×10¹², 1×10⁶ to 1×10¹¹, 1×10⁷ to 1×10¹¹, 1×10⁸ to 1×10¹¹, 1×10⁹ to 1×10¹¹, 1×10¹⁰ to 1×10¹¹, 1×10⁶ to 1×10¹⁰, 1×10⁷ to 1×10¹⁰, 1×10⁸ to 1×10¹⁰, 1×10⁹ to 1×10¹⁰, 1×10⁶ to 1×10⁹, 1×10⁷ to 1×10⁹, 1×10⁸ to 1×10⁹, 1×10⁶ to 1×10⁸, 1×10⁷ to 1×10⁸ 1×10⁶ to 1×10⁷ CFUs per milliliter.

[0247] In some embodiments, microbial cells of the present invention are frozen. In some embodiments, the microbial cells of the present invention are mixed with one or more cryoprotective agents (CPAs) before freezing. In some embodiments, the ratio of cells to CPA is approximately 25:1, 10:1, 5:1, 4:1, 3:1, 2:1, 1:1, 1:2, 1:3, 1:4, 1:5, 1:10, or 1:25. In some embodiments, a CPA comprises one or more of glycerol, maltodextrin, sucrose, inulin, trehalose, and alginate. In some embodiments, a CPA further comprises one or more antioxidants. In some embodiments, an antioxidant is selected from the list of cysteine, ascorbic acid, and riboflavin.

[0248] In some embodiments, the microbial cells of the present invention are lyophilized. In some embodiments, the lyophilized cells are used to make an orally-administered dose of the invention. In some embodiments, primary drying is conducted below approximately −20° C. In some embodiments, primary drying is followed by a secondary drying at a higher temperature, e.g. greater than 0° C., greater than 5° C., or greater than 10° C.

[0249] In some embodiments a pharmaceutical composition disclosed herein may comprise a microbial consortium of the present invention and one or more than one agent selected from, but not limited to: carbohydrates (e.g., glucose, sucrose, galactose, mannose, ribose, arabinose, xylose, fructose, maltose, cellobiose, lactose, deoxyribose, hexose); lipids (e.g. lauric acid (12:0) myristic acid (14:0), palmitic acid (16:0), palmitoleic acid (16:1), margaric acid (17:0), heptadecenoic acid (17:1), stearic acid (18:0), oleic acid (18:1), linoleic acid (18:2), linolenic acid (18:3), octadecatetraenoic acid (18:4), arachidic acid (20:0), eicosenoic acid (20:1), eicosadienoic acid (20:2), eicosatetraenoic acid (20:4), eicosapentaenoic acid (20:5) (EPA), docosanoic acid (22:0), docosenoic acid (22:1), docosapentaenoic acid (22:5), docosahexaenoic acid (22:6) (DHA), and tetracosanoic acid (24:0)); minerals (e.g., chloride, sodium, calcium, iron, chromium, copper, iodine, zinc, magnesium, manganese, molybdenum, phosphorus, potassium, and selenium); vitamins (e.g., vitamin C, vitamin A, vitamin E, vitamin B 12, vitamin K, riboflavin, niacin, vitamin D, vitamin B6, folic acid, pyridoxine, thiamine, pantothenic acid, and biotin); buffering agents (e.g. sodium citrate, magnesium carbonate, magnesium bicarbonate, calcium carbonate, and calcium bicarbonate); preservatives (e.g., alpha-tocopherol, ascorbate, parabens, chlorobutanol, and phenol); binders (e.g., starches, pregelatinized starches, gelatin, polyvinylpyrolidone, cellulose, methylcellulose, sodium carboxymethylcellulose, ethylcellulose, polyacrylamides, polyvinyloxoazolidone, polyvinylalcohols, C₁₂-C₁₈ fatty acid alcohol, polyethylene glycol, polyols, saccharides, oligosaccharides); lubricants (e.g. magnesium stearate, calcium stearate, zinc stearate, hydrogenated vegetable oils, sterotex, polyoxyethylene monostearate, talc, polyethyleneglycol, sodium benzoate, sodium lauryl sulfate, magnesium lauryl sulfate, and light mineral oil); dispersants (e.g., starch, alginic acid, polyvinylpyrrolidones, guar gum, kaolin, bentonite, purified wood cellulose, sodium starch glycolate, isoamorphous silicate, and microcrystalline cellulose); disintegrants (e.g., corn starch, potato starch, pregelatinized and modified starches thereof, sweeteners, clays, such as bentonite, micro-crystalline cellulose, alginates, sodium starch glycolate, gums such as agar, guar, locust bean, karaya, pecitin, tragacanth, sodium bicarbonate in combination with citric acid, and sodium bicarbonate in combination with tartaric acid); flavoring agents; sweeteners; and coloring agents. In some embodiments, additional nutrients such as oxalate or formate are added to support robust revival of specific strains from the capsule.

[0250] In certain embodiments, a microbial consortium of the present invention is administered orally as a lyophilized powder, capsule, tablet, troche, lozenge, granule, gel or liquid. In some embodiments, a microbial consortium of the present invention is administered as a tablet or pill and can be compressed, multiply compressed, multiply layered, and/or coated. For example, in some embodiments, a lyophilized powder is filled in “0”, “00”, or “000” size capsules to accommodate various strengths. In some embodiments the tablet or pill comprises an enteric coating.

### Therapeutic Applications

[0251] The present invention provides microbial consortia capable of engrafting into one or more than one niche of a gastrointestinal tract where it is capable of metabolizing a first metabolic substrate that causes or contributes to disease in an animal. In some embodiments, the animal is a mouse. In some embodiments, the animal is a germ-free mouse. In some embodiments, the animal is a mouse engrafted with a human microbiome. In some embodiments, the animal is a human.

[0252] In some embodiments of the invention, when administered to an animal, the animal is pre-treated with one or more antibiotics prior to administration of the microbial consortium. In some embodiments, the one or more antibiotics is selected from ampicillin, enrofloxacin, clarithromycin, and metronidazole. In some embodiments, the animal is pre-treated with a polyethylene glycol bowel-preparation procedure.

[0253] In some embodiments, when administered to an animal, the microbial consortium of the present invention significantly reduces the concentration of a first metabolic substrate present in the blood, serum, bile, stool or urine as compared to samples collected pretreatment from the same animal or from corresponding control animal that have not been administered with the microbial consortium. For example, in some embodiments, when administered to an animal on a high oxalate diet, the microbial consortium of the present invention significantly reduces the concentration of oxalate present in a sample of blood, serum, bile, stool or urine as compared to samples collected pretreatment from the same animal or from a corresponding control animal that has not been administered with the microbial consortium. As used herein, a “high oxalate diet” refers to a diet that induces a hyperoxaluria phenotype in an animal. For example, in some embodiments, an animal may be maintained on a high oxalate diet for 7 days to 1 month. In some embodiments, an animal may be maintained on a high oxalate diet for 7 days, 14 days, 21 days, or 1 month. In some embodiments, a high oxalate diet can have a calcium to oxalate molar ratio of less than 2.0. For example, in some embodiments, a high oxalate diet can have a calcium to oxalate molar ratio of about 0.1 to about 0.8. In some embodiments, an animal may be maintained on a grain-based diet that is rich in complex polysaccharides and nutritionally complete and given ad libitum drinking water supplemented with about 0.5% to 1% oxalate. In some embodiments, a control animal may be maintained on a diet as shown in Table 1 or an animal may be maintained on a high oxalate diet as shown in Table 2.

TABLE 1
Control Diet

| | | |
|---|---|---|
| Casein | 200 | mg/g |
| DL-Methionine | 3.0 | mg/g |
| Sucrose | 302.8 | mg/g |
| Corn Starch | 280.0 | mg/g |
| Corn Oil | 50.0 | mg/g |
| Inulin | 35.0 | mg/g |
| Pectin | 35.0 | mg/g |
| Cellulose | 25.0 | mg/g |
| Mineral Mix, Ca—P Deficient (79055) | 13.37 | mg/g |
| Potassium phosphate, monobasic | 11.4 | mg/g |
| Calcium chloride | 14.94 | mg/g |
| Sodium chloride | 19.48 | mg/g |
| Vitamin Mix, Teklad (40060) | 10.0 | mg/g |
| Ethoxyquin, antioxidant | 0.01 | mg/g |

TABLE 2
Oxalate Diet

| | | |
|---|---|---|
| Casein | 200 | mg/g |
| DL-Methionine | 3.0 | mg/g |
| Sucrose | 316.2 | mg/g |
| Corn Starch | 280.0 | mg/g |
| Corn Oil | 50.0 | mg/g |
| Inulin | 35.0 | mg/g |
| Pectin | 35.0 | mg/g |
| Cellulose | 25.0 | mg/g |
| Mineral Mix, Ca—P Deficient (79055) | 13.37 | mg/g |
| Potassium phosphate, monobasic | 11.4 | mg/g |
| Calcium chloride | 1.05 | mg/g |
| Sodium chloride | 16.23 | mg/g |
| Vitamin Mix, Teklad (40060) | 10.0 | mg/g |
| Ethoxyquin, antioxidant | 0.01 | mg/g |
| Sodium oxalate | 3.72 | mg/g |

[0254] In some embodiments, a microbial consortium of the present invention is administered to an animal on a diet supplemented with one or more bile acids. In some embodiments, the diet is supplemented with one or more of TCDCA, GCDCA, TCA, GCA, CA, CDCA, LCA, or DCA. For example, in some embodiments, an animal may be maintained on a diet supplemented with one or more bile acids for 7 days to 1 month. In some embodiments, an animal may be maintained on a diet supplemented with bile acids for 7 days, 14 days, 21 days, or 1 month.

[0255] In some embodiments, a microbial consortium of the present invention is used to treat a subject having or at risk of developing a metabolic disease or condition. For example, in some embodiments, the metabolic disease is primary hyperoxaluria. In some embodiments, the metabolic disease is secondary hyperoxaluria. In some embodiments, the metabolic disease is secondary hyperoxaluria associated with bowel resection surgery or IBD. In some embodiments, a microbial consortium of the present invention significantly reduces the concentration of oxalate present in a sample of blood, serum, bile, stool, or urine when administered to a subject by at least 20%, by at least 30%, by at least 40%, by at least 50%, by at least 60%, by at least 70%, or by at least 80% as compared to untreated subjects or pre-administration concentrations.

[0256] In some embodiments, a microbial consortium of the present invention significantly alters the profile and/or concentration of bile acids present in an animal. For example, in some embodiments, a microbial consortium of the present invention significantly alters the profile and/or concentration of Tβ-MCA, Tα-MCA, TUDCA, THDCA, TCA, 7β-CA, 7-oxo-CA, TCDCA, Tω-MCA, TDCA, α-MCA, β-MCA, ω-MCA, Muro-CA, d4-CA, CA, TLCA, UDCA, HDCA, CDCA, DCA, and LCA in an animal.

[0257] In some embodiments, a high-complexity defined gut microbial community of the present invention can be used to treat an animal having a cholestatic disease, such as, for example, primary sclerosing cholangitis, primary biliary cholangitis, progressive familial intrahepatic cholestasis, or nonalcoholic steatohepatitis. For example in some embodiments, the animal may be a mammal, and more particularly a human.

[0258] In some embodiments, a microbial consortium of the present invention can be administered via an enteric route. For example, in some embodiments, a microbial consortium is administered orally, rectally (e.g., by enema, suppository, or colonoscope), or by oral or nasal tube.

[0259] In some embodiments, a microbial consortium of the present invention can be administered to a specific location along the gastrointestinal tract. For example, in some embodiments, a microbial consortium can be administered into one or more than one gastrointestinal location including the mouth, esophagus, stomach, small intestine (duodenum, jejunum, ileum), large intestine (cecum, ascending colon, transverse colon, descending colon), or rectum. In some embodiments, a microbial consortium can be administered in all regions of the gastrointestinal tract.

### Dosages

[0260] In some embodiments, a microbial consortium of the present invention is administered in a dosage form having a total amount of microbial consortium of at least 1×10⁶ colony forming units (CFU) or above, at least 2×10⁶ CFU or above, at least 3×10⁶ CFU or above, at least 4×10⁶ CFU or above, at least 5×10⁶ CFU or above, at least 6×10⁶ CFU or above, at least 7×10⁶ CFU or above, at least 8×10⁶ CFU or above, at least 9×10⁶ CFU or above, at least 1×10⁷ CFU or above, at least 2×10⁷ CFU or above, at least 3×10⁷ CFU or above, at least 4×10⁷ CFU or above, at least 5×10⁷ CFU or above, at least 6×10⁷ CFU or above, at least 7×10⁷ CFU or above, at least 8×10⁷ CFU or above, at least 9×10⁷ CFU or above, 1×10⁸ CFU or above, at least 2×10⁸ CFU or above, at least 3×10⁸ CFU or above, at least 4×10⁸ CFU or above, at least 5×10⁸ CFU or above, at least 6×10⁸ CFU or above, at least 7×10⁸ CFU or above, at least 8×10⁸ CFU or above, at least 9×10⁸ CFU or above, 1×10⁹ CFU or above, at least 2×10⁹ CFU or above, at least 3×10⁹ CFU or above, at least 4×10⁹ CFU or above, at least 5×10⁹ CFU or above, at least 6×10⁹ CFU or above, at least 7×10⁹ CFU or above, at least 8×10⁹ CFU or above, at least 9×10⁹ CFU or above, 1×10¹⁰ CFU or above, at least 2×10¹⁰ CFU or above, at least 3×10¹⁰ CFU or above, at least 4×10¹⁰ CFU or above, at least 5×10¹⁰ CFU or above, at least 6×10¹⁰ CFU or above, at least 7×10¹⁰ CFU or above, at least 8×10¹⁰ CFU or above, at least 9×10¹⁰ CFU or above, 1×10¹¹ CFU or above, at least 2×10¹¹ CFU or above, at least 3×10¹¹ CFU or above, at least 4×10¹¹ CFU or above, at least 5×10¹¹ CFU or above, at least 6×10¹¹ CFU or above, at least 7×10¹¹ CFU or above, at least 8×10¹¹ CFU or above, at least 9×10¹¹ CFU or above, 1×10¹² CFU or above, at least 2×10¹² CFU or above, at least 3×10¹² CFU or above, at least 4×10¹² CFU or above, at least 5×10¹² CFU or above, at least 6×10¹² CFU or above, at least 7×10¹² CFU or above, at least 8×10¹² CFU or above, or at least 9×10¹² CFU or above.

[0261] In some embodiments, a microbial consortium of the present invention is administered in a dosage form having a total amount of microbial consortium of 0.1 ng to 500 mg, 0.5 ng to 500 mg, 1 ng to 500 mg, 5 ng to 500 mg, 10 ng to 500 mg, 50 ng to 500 mg, 100 ng to 500 mg, 500 ng to 500 mg, 1 μg to 500 mg, 5 μg to 500 mg, 10 μg to 500 mg, 50 μg to 500 mg, 100 μg to 500 mg, 500 μg to 500 mg, 1 mg to 500 mg, 5 mg to 500 mg, 10 mg to 500 mg, 50 mg to 500 mg, 100 mg to 500 mg, 0.1 ng to 100 mg, 0.5 ng to 100 mg, 1 ng to 100 mg, 5 ng to 100 mg, 10 ng to 100 mg, 50 ng to 100 mg, 100 ng to 100 mg, 500 ng to 500 mg, 1 μg to 100 mg, 5 μg to 100 mg, 10 us to 100 mg, 50 us to 100 mg, 100 μg to 100 mg, 500 μg to 100 mg, 1 mg to 500 mg, 5 mg to 100 mg, 10 mg to 100 mg, 50 mg to 100 mg, 0.1 ng to 50 mg, 0.5 ng to 50 mg, 1 ng to 50 mg, 5 ng to 50 mg, 10 ng to 50 mg, 50 ng to 50 mg, 100 ng to 50 mg, 500 ng to 500 mg, 1 μg to 50 mg, 5 μg to 50 mg, 10 μg to 50 mg, 50 us to 50 mg, 100 μg to 50 mg, 500 μg to 50 mg, 1 mg to 500 mg, 5 mg to 50 mg, 10 mg to 50 mg, 0.1 ng to 10 mg, 0.5 ng to 10 mg, 1 ng to 10 mg, 5 ng to 10 mg, 10 ng to 10 mg, 50 ng to 10 mg, 100 ng to 10 mg, 500 ng to 500 mg, 1 μg to 10 mg, 5 μg to 10 mg, 10 us to 10 mg, 50 μg to 10 mg, 100 μg to 10 mg, 500 μg to 10 mg, 1 mg to 500 mg, 5 mg to 10 mg, 0.1 ng to 5 mg, 0.5 ng to 5 mg, 1 ng to 5 mg, 5 ng to 5 mg, 10 ng to 5 mg, 50 ng to 5 mg, 100 ng to 5 mg, 500 ng to 500 mg, 1 μg to 5 mg, 5 μg to 5 mg, 10 μg to 5 mg, 50 us to 5 mg, 100 us to 5 mg, 500 μg to 5 mg, 1 mg to 500 mg, 0.1 ng to 1 mg, 0.5 ng to 1 mg, 1 ng to 1 mg, 5 ng to 1 mg, 10 ng to 1 mg, 50 ng to 1 mg, 100 ng to 1 mg, 500 ng to 500 mg, 1 μg to 1 mg, 5 μg to 1 mg, 10 μg to 1 mg, 50 μg to 1 mg, 100 μg to 1 mg, 500 us to 1 mg, 0.1 ng to 500 μg, 0.5 ng to 500 μg, 1 ng to 500 μg, 5 ng to 500 μg, 10 ng to 500 μg, 50 ng to 500 μg, 100 ng to 500 μg, 500 ng to 500 μg, 1 μg to 500 μg, 5 us to 500 μg, 10 us to 500 μg, 50 us to 500 μg, 100 μg to 500 μg, 0.1 ng to 100 μg, 0.5 ng to 100 μg, 1 ng to 100 μg, 5 ng to 100 μg, 10 ng to 100 μg, 50 ng to 100 μg, 100 ng to 100 μg, 500 ng to 100 μg, 1 μg to 100 μg, 5 μg to 100 μg, 10 μg to 100 μg, 50 μg to 100 μg, 0.1 ng to 50 μg, 0.5 ng to 50 μg, 1 ng to 50 μg, 5 ng to 50 μg, 10 ng to 50 μg, 50 ng to 50 μg, 100 ng to 50 μg, 500 ng to 50 μg, 1 μg to 50 μg, 5 μg to 50 μg, 10 μg to 50 μg, 0.1 ng to 10 μg, 0.5 ng to 10 μg, 1 ng to 10 μg, 5 ng to 10 μg, 10 ng to 10 μg, 50 ng to 10 μg, 100 ng to 10 μg, 500 ng to 10 μg, 1 μg to 10 μg, 5 μg to 10 μg, 0.1 ng to 5 μg, 0.5 ng to 5 μg, 1 ng to 5 μg, 5 ng to 5 μg, 10 ng to 5 μg, 50 ng to 5 μg, 100 ng to 5 μg, 500 ng to 5 μg, 1 μg to 5 μg, 0.1 ng to 1 μg, 0.5 ng to 1 μg, 1 ng to 1 μg, 5 ng to 1 μg, 10 ng to 1 μg, 50 ng to 1 μg, 100 ng to 1 μg, 500 ng to 1 μg, 0.1 ng to 500 ng, 0.5 ng to 500 ng, 1 ng to 500 ng, 5 ng to 500 ng, 10 ng to 500 ng, 50 ng to 500 ng, 100 ng to 500 ng, 0.1 ng to 100 ng, 0.5 ng to 100 ng, 1 ng to 100 ng, 5 ng to 100 ng, 10 ng to 100 ng, 50 ng to 100 ng, 0.1 ng to 50 ng, 0.5 ng to 50 ng, 1 ng to 50 ng, 5 ng to 50 ng, 10 ng to 50 ng, 0.1 ng to 10 ng, 0.5 ng to 10 ng, 1 ng to 10 ng, 5 ng to 10 ng, 0.1 ng to 5 ng, 0.5 ng to 5 ng, 1 ng to 5 ng, 0.1 ng to 1 ng, 0.1 ng to 1 ng, or 0.1 ng to 0.5 ng total dry weight.

[0262] In other embodiments, a microbial consortium of the present invention is consumed at a rate of 0.1 ng to 500 mg a day, 0.5 ng to 500 mg a day, 1 ng to 500 mg a day, 5 ng to 500 mg a day, 10 ng to 500 mg a day, 50 ng to 500 mg a day, 100 ng to 500 mg a day, 500 ng to 500 mg a day, 1 μg to 500 mg a day, 5 μg to 500 mg a day, 10 μg to 500 mg a day, 50 μg to 500 mg a day, 100 μg to 500 mg a day, 500 μg to 500 mg a day, 1 mg to 500 mg a day, 5 mg to 500 mg a day, 10 mg to 500 mg a day, 50 mg to 500 mg a day, 100 mg to 500 mg a day, 0.1 ng to 100 mg a day, 0.5 ng to 100 mg a day, 1 ng to 100 mg a day, 5 ng to 100 mg a day, 10 ng to 100 mg a day, 50 ng to 100 mg a day, 100 ng to 100 mg a day, 500 ng to 500 mg a day, 1 μg to 100 mg a day, 5 μg to 100 mg a day, 10 μg to 100 mg a day, 50 μg to 100 mg a day, 100 μg to 100 mg a day, 500 μg to 100 mg a day, 1 mg to 500 mg a day, 5 mg to 100 mg a day, 10 mg to 100 mg a day, 50 mg to 100 mg a day, 0.1 ng to 50 mg a day, 0.5 ng to 50 mg a day, 1 ng to 50 mg a day, 5 ng to 50 mg a day, 10 ng to 50 mg a day, 50 ng to 50 mg a day, 100 ng to 50 mg a day, 500 ng to 500 mg a day, 1 μg to 50 mg a day, 5 μg to 50 mg a day, 10 μg to 50 mg a day, 50 μg to 50 mg a day, 100 μg to 50 mg a day, 500 μg to 50 mg a day, 1 mg to 500 mg a day, 5 mg to 50 mg a day, 10 mg to 50 mg a day, 0.1 ng to 10 mg a day, 0.5 ng to 10 mg a day, 1 ng to 10 mg a day, 5 ng to 10 mg a day, 10 ng to 10 mg a day, 50 ng to 10 mg a day, 100 ng to 10 mg a day, 500 ng to 500 mg a day, 1 μg to 10 mg a day, 5 μg to 10 mg a day, 10 μg to 10 mg a day, 50 μg to 10 mg a day, 100 μg to 10 mg a day, 500 μg to 10 mg a day, 1 mg to 500 mg a day, 5 mg to 10 mg a day, 0.1 ng to 5 mg a day, 0.5 ng to 5 mg a day, 1 ng to 5 mg a day, 5 ng to 5 mg a day, 10 ng to 5 mg a day, 50 ng to 5 mg a day, 100 ng to 5 mg a day, 500 ng to 500 mg a day, 1 μg to 5 mg a day, 5 μg to 5 mg a day, 10 μg to 5 mg a day, 50 μg to 5 mg a day, 100 μg to 5 mg a day, 500 μg to 5 mg a day, 1 mg to 500 mg a day, 0.1 ng to 1 mg a day, 0.5 ng to 1 mg a day, 1 ng to 1 mg a day, 5 ng to 1 mg a day, 10 ng to 1 mg a day, 50 ng to 1 mg a day, 100 ng to 1 mg a day, 500 ng to 500 mg a day, 1 μg to 1 mg a day, 5 μg to 1 mg a day, 10 μg to 1 mg a day, 50 μg to 1 mg a day, 100 μg to 1 mg a day, 500 μg to 1 mg a day, 0.1 ng to 500 μg a day, 0.5 ng to 500 μg a day, 1 ng to 500 μg a day, 5 ng to 500 μg a day, 10 ng to 500 μg a day, 50 ng to 500 μg a day, 100 ng to 500 μg a day, 500 ng to 500 μg a day, 1 μg to 500 μg a day, 5 μg to 500 μg a day, 10 μg to 500 μg a day, 50 μg to 500 μg a day, 100 μg to 500 μg a day, 0.1 ng to 100 μg a day, 0.5 ng to 100 μg a day, 1 ng to 100 μg a day, 5 ng to 100 μg a day, 10 ng to 100 μg a day, 50 ng to 100 μg a day, 100 ng to 100 μg a day, 500 ng to 100 μg a day, 1 μg to 100 μg a day, 5 μg to 100 μg a day, 10 μg to 100 μg a day, 50 μg to 100 μg a day, 0.1 ng to 50 μg a day, 0.5 ng to 50 μg a day, 1 ng to 50 μg a day, 5 ng to 50 μg a day, 10 ng to 50 μg a day, 50 ng to 50 μg a day, 100 ng to 50 μg a day, 500 ng to 50 μg a day, 1 μg to 50 μg a day, 5 μg to 50 μg a day, 10 μg to 50 μg a day, 0.1 ng to 10 μg a day, 0.5 ng to 10 μg a day, 1 ng to 10 μg a day, 5 ng to 10 μg a day, 10 ng to 10 μg a day, 50 ng to 10 μg a day, 100 ng to 10 μg a day, 500 ng to 10 μg a day, 1 μg to 10 μg a day, 5 μg to 10 μg a day, 0.1 ng to 5 μg a day, 0.5 ng to 5 μg a day, 1 ng to 5 μg a day, 5 ng to 5 μg a day, 10 ng to 5 μg a day, 50 ng to 5 μg a day, 100 ng to 5 μg a day, 500 ng to 5 μg a day, 1 μg to 5 μg a day, 0.1 ng to 1 μg a day, 0.5 ng to 1 μg a day, 1 ng to 1 μg a day, 5 ng to 1 μg a day, 10 ng to 1 μg a day, 50 ng to 1 μg a day, 100 ng to 1 μg a day, 500 ng to 1 μg a day, 0.1 ng to 500 ng a day, 0.5 ng to 500 ng a day, 1 ng to 500 ng a day, 5 ng to 500 ng a day, 10 ng to 500 ng a day, 50 ng to 500 ng a day, 100 ng to 500 ng a day, 0.1 ng to 100 ng a day, 0.5 ng to 100 ng a day, 1 ng to 100 ng a day, 5 ng to 100 ng a day, 10 ng to 100 ng a day, 50 ng to 100 ng a day, 0.1 ng to 50 ng a day, 0.5 ng to 50 ng a day, 1 ng to 50 ng a day, 5 ng to 50 ng a day, 10 ng to 50 ng a day, 0.1 ng to 10 ng a day, 0.5 ng to 10 ng a day, 1 ng to 10 ng a day, 5 ng to 10 ng a day, 0.1 ng to 5 ng a day, 0.5 ng to 5 ng a day, 1 ng to 5 ng a day, 0.1 ng to 1 ng a day, 0.1 ng to 1 ng a day, or 0.1 ng to 0.5 ng a day.

[0263] In some embodiments, the microbial composition of the present invention is administered for a period of at least 1 day to 1 week, 1 week to 1 month, 1 month to 3 months, 3 months to 6 months, 6 months to 1 year, or more than 1 year. For example, in some embodiments, the microbial composition of the present invention is administered for a period of at least 1 day, 2 days, 3 days, 4 days, 5 days, 6 days, 1 week, 2 weeks, 3 weeks, 1 month, 2 months, 3 months, 4 months, 5 months, 6 months, or 1 year.

[0264] In some embodiments, a microbial consortium of the present invention is administered as a single dose or as multiple doses. For example, in some embodiments, a microbial consortium of the present invention is administered once a day for 2 days, 3 days, 4 days, 5 days, 6 days, 1 week, 2 weeks 3 weeks, 1 month, 2 months, 3 months, 4 months, 5 months, 6 months, or 1 year. In some embodiments, a microbial consortium of the present invention is administered multiple times daily. For example, in some embodiments, a microbial consortium of the present invention is administered twice daily, three times daily, 4 times daily, or 5 times daily. In some embodiments, a microbial consortium of the present invention is administered intermittently. For example, in some embodiments, a microbial consortium of the present invention is administered once weekly, once monthly, or when a subject is in need thereof.

### Combination Therapy

[0265] In some embodiments, a microbial consortium of the present invention can be administered in combination with other agents. For example, in some embodiments, a microbial consortium of the present invention can be administered with an antimicrobial agent, an antifungal agent, an antiviral agent, an antiparasitic agent or a prebiotic. In some embodiments, a microbial consortium of the present invention can be administered subsequent to administration of an antimicrobial agent, an antifungal agent, an antiviral agent, an antiparasitic agent or a prebiotic. In some embodiments, administration may be sequential over a period of hours or days, or simultaneously.

[0266] For example, in some embodiments, a microbial consortium can be administered with, or pre-administered with, one or more than one antibacterial agent selected from fluoroquinolone antibiotics (ciprofloxacin, Levaquin, floxin, tequin, avelox, and norflox); cephalosporin antibiotics (cephalexin, cefuroxime, cefadroxil, cefazolin, cephalothin, cefaclor, cefamandole, cefoxitin, cefprozil, and ceftobiprole); penicillin antibiotics (amoxicillin, ampicillin, penicillin V, dicloxacillin, carbenicillin, vancomycin, and methicillin); tetracycline antibiotics (tetracycline, minocycline, oxytetracycline, and doxycycline); and carbapenem antibiotics (ertapenem, doripenem, imipenem/cilastatin, and meropenem).

[0267] For example, in some embodiments, a microbial consortium can be administered with one or more than one antiviral agent selected from Abacavir, Acyclovir, Adefovir, Amprenavir, Atazanavir, Cidofovir, Darunavir, Delavirdine, Didanosine, Docosanol, Efavirenz, Elvitegravir, Emtricitabine, Enfuviltide, Etravirine, Famciclovir, Foscamet, Fomivirsen, Ganciclovir, Indinavir, Idoxuridine, Lamivudine, Lopinavir Maraviroc, MK-2048, Nelfinavir, Nevirapine, Penciclovir, Raltegravir, Rilpivirine, Ritonavir, Saquinavir, Stavudine, Tenofovir Trifluridine, Valaciclovir, Valganciclovir, Vidarabine, Ibacitabine, Amantadine, Oseltamivir, Rimantidine, Tipranavir, Zalcitabine, Zanamivir, and Zidovudine.

[0268] In some embodiments, a microbial consortium can be administered with one or more than one antifungal agent selected from miconazole, ketoconazole, clotrimazole, econazole, omoconazole, bifonazole, butoconazole, fenticonazole, isoconazole, oxiconazole, sertaconazole, sulconazole, and tioconazole; triazole antifungals such as fluconazole, itraconazole, isavuconazole, ravuconazole, posaconazole, voriconazok, terconazole, and albaconazole; thiazole antifungals such as abafungin; allylamine antifungals such as terbinafine, naftifine, and butenafine; and echinocandin antifungals such as anidulafungin, caspofungin, and micafungin; polygodial; benzoic acid; ciclopirox; tolnaftate; undecylenic acid; flucytosine or 5-fluorocytosine; griseofulvin; and haloprogin.

[0269] In some embodiments, a microbial consortium can be administered with one or more than one anti-inflammatory and/or immunosuppressive agent selected from cyclophosphamide, mycophenolate mofetil, corticosteroids, mesalazine, mesalamine, sulfasalazine, sulfasalazine derivatives, cyclosporin A, mercaptopurine, azathiopurine, prednisone, methotrexate, antihistamines, glucocorticoids, epinephrine, theophylline, cromolyn sodium, anti-leukotrienes, anticholinergics, monoclonal anti-IgE, immunomodulatory peptides, immunomodulatory small molecules, immunomodulatory cytokines, immunomodulatory antibodies, and vaccines.

[0270] In some embodiments, a microbial consortium of the present invention can be administered with one or more than one prebiotic selected from, but not limited to, amino acids, biotin, fructooligosaccharides, galactooligosaccharides, inulin, lactulose, mannan oligosaccharides, oligofructose-enriched inulin, oligofructose, oligodextrose, tagatose, trans-galactooligosaccharide, and xylooligosaccharides.

### EXAMPLES

[0271] The disclosure now being generally described, will be more readily understood by reference to the following examples, which are included merely for purposes of illustration of certain aspects and embodiments of the present disclosure, and are not intended to limit the scope of the disclosure in any way.

### Example 1: Sourcing and Identification of Active and Supportive Microbial Strains

[0272] Active and supportive microbial strains were derived from human donor fecal samples, or were purchased from one of three depositories: the American Type Culture Collection (ATCC; www.atcc.org), the Leibniz institute DSMZ (www.dsmz.de), or BEI Resources (www.beiresources.org).

[0273] Microbial strains purchased from a depository were cultured according to depository instructions.

### Isolation of Donor-Derived Active and Supportive Microbial Strains

[0274] Fecal donors were selected based on multiple criteria, including a health and medical history questionnaire, physical exam, and blood and stool tests for assessing pathogen-free status. Stool samples from donors who did not meet the inclusion criteria based on any of the above-mentioned assessment were discarded from quarantine.

[0275] Donors provided a stool sample sealed in a plastic container. Upon collection, stool samples were immediately transferred to an anaerobic chamber (5% CO₂, 5% H₂, 90% N₂) within 15 minutes of collection.

[0276] Once transferred to the anaerobic chamber, the fresh stool sample was labeled, weighed, evaluated for anomalies (presence of urine, toilet paper, etc.), and scored according to the Bristol scale. A stool sample weighing less than 45 g, or that failed to conform to a Bristol Stool Scale type 2, 3, 4 or 5, was rejected. Stool samples that met the acceptance criteria were processed and aliquoted. 45 g of the stool sample was transferred into a sterile container for specific pathogen testing. The remainder of the sample was mixed with cryopresertative, homogenized, and aliquoted into cryovials (approximately 2 g of sample per vial; 6 vials per stool sample). These vials were transferred from the anaerobic chamber to a −80° C. freezer for storage until shipping on dry ice.

[0277] Microbial strain isolation was performed by making serial dilution aliquots of the stool samples and plating said aliquots on a variety of microbial cultivation media suitable for growth of anaerobes. All cultures were grown under anaerobic conditions for the duration of culturing. Approximately 20 different media/culture conditions were used to isolate a variety of gut microbial species. Specific enrichment techniques were performed for species having particular metabolic capabilities, such as consumption or tolerance of oxalate or bile acids. In order to enrich for strains having oxalate metabolism capabilities, aliquots of the serially-diluted stool samples were plated on agar growth media supplemented with varying concentrations of potassium oxalate (20 mM, 40 mM, 80 mM, 160 mM, or 200 mM). In order to enrich for species capable of metabolizing bile acids, aliquots of serially diluted stool samples were plated on growth media supplemented with 2% bile. In order to isolate archaea, diluted fecal samples were plated on culture media containing a mixture of antibiotics that is lethal to both gram-positive and gram-negative bacteria. This archaeal isolation plate was co-incubated in a small enclosed container together with a separate plate containing a heterogenous population of microbes derived from a fecal sample; the heterogenous population contained hydrogen-producing microbes, thereby providing hydrogen (through diffusion within the small container) to allow archaea on the archaeal isolation plate to grow.

[0278] Single colonies from isolation or enrichment plates were picked for further isolation on appropriate microbial cultivation agar media plates (passage 2). After incubation at 37° C., if the single colony plating resulted in uniformly isolated colony morphology, the culture was further investigated for strain identification. Preliminary strain identification was performed either by 16S rRNA gene sequencing or by creating and analyzing proteomic fingerprinting using high-throughput Matrix-Assisted Laser Desorption/Ionization Time-Of-Flight Mass Spectrometry (MALDI-TOF MS). If the single-colony plating resulted in multiple colony morphologies, each unique colony type was picked for further isolation on an appropriate cultivation agar plate until uniform colony morphology was achieved (passage 3 or more). Monoculture identity was confirmed by 16S rRNA gene sequencing.

[0279] Isolated colonies of strains purified to monocultures for species of interest, as well as novel strains of unknown species, were inoculated into culture tubes containing appropriate broth media and incubated under anaerobic conditions at 37° C. For most strains, sufficient growth was visualized during this first broth passaging as indicated by turbidity. However, some strains required more than one broth passaging to achieve sufficient growth. Sterile glycerol solution was added to the microbial culture to achieve a final glycerol concentration of 25% prior to mixing and aliquoting into cryovials. The cryovials were removed from the anaerobic gas chambers and were promptly transferred to −80° C.

[0280] After at least 10 hours of freezing, one vial of each purified frozen strain isolate was retrieved from the freezer and thawed under anaerobic conditions followed by plating on agar plates containing appropriate growth media. The plates were incubated under anaerobic conditions at 37° C. Growth on the plate was observed to confirm revival and uniform morphology for each purified isolate. Individual colonies of the isolates were subsequently analyzed by 16S rRNA gene sequencing to confirm the identity and colony purity of each frozen strain against the National Center for Biotechnology Information (NCBI) 16S rRNA gene databases.

[0281] A list of donor-derived isolates and a summary of their corresponding isolation media and growth/banking media is reported in Table 3. Additional identifying information for the isolates is reported in Table 4.

[0282] in vitro activity-based assays, bioinformatic screens to identify strains with the genetic capability to metabolize oxalate, and identification of target species with known oxalate metabolizing activity based on scientific literature, were utilized to identify candidate active strains. Active oxalate-metabolizing strains obtained from depositories (“commercial strains”) include those listed in Table 5. Supportive commercial strains include those listed in Table 6. Strains in Table 5 and Table 6 are identified by their genus/species and by the depository catalog number. “ATCC” strains were obtained from ATCC, “DSM” strains were obtained from the Liebniz Institute DSMZ, and “HM” strains were obtained from BEI Resources.

### MALDI-TOF MS

[0283] MALDI-TOF mass spectrometry was used for preliminary identification of bacterial strains (genus and/or species) using a BD Bruker MALDI Biotyper. Briefly, an α-cyano-4-hydroxycinnamic acid (HCCA) matrix was prepared in Bruker standard solvent (acetonitrile 50%, water 47.5% and trifluoroacetic acid 2.5%). A disposable MALDI Biotyper Biotarget plate was loaded with a smear of the sample bacterial colony, overlaid with HCCA matrix and allowed to dry. For strains that required extended extraction, 70% formic acid was added to the sample smear prior to adding HCCA matrix. Bruker Bacterial Testing Standards (BTS) were also loaded onto the Biotarget for quality control analysis. The Biotarget as then loaded into a Biotyper MALDI-TOF machine, and the sample was analyzed. The machine was configured to perform the quality control analysis of the BTS quality control samples first and aborted the run if the BTS quality control analysis failed. The generated spectrum of the test sample was then compared to a database of the reference proteomics spectra containing strains belonging to species which were previously characterized by their proteomic fingerprinting.

### DNA Extraction

[0284] DNA was extracted from fecal samples using a Qiagen DNeasy Power Soil Kit (Qiagen, Germantown, Md.) in accordance with the manufacturer's instructions. Alternative methods for extracting DNA from fecal samples are well-known and routinely practiced in the art (e.g., described by Sambrook and Russell, Molecular Cloning: A Laboratory Manual, 3d ed., 2001).

### Whole Genome Shotgun Sequencing

[0285] Sequencing of DNA samples was carried out using the TruSeq Nano DNA Library Preparation kit (Illumina, San Diego, Calif., US) and a NextSeq platform (Illumina, San Diego, Calif., US). In brief, sequencing libraries were prepared from DNA extracted from each sample. DNA was mechanically fragmented using an ultrasonicator. The fragmented DNA was subjected to end repair and size selection of fragments, adenylation of 3′ ends, linked with adaptors, and DNA fragments enriched according to the TruSeq Nano DNA Library Preparation kit manual (Illumina, San Diego, Calif., US). Samples were sequenced to generate more than 50 million paired-end reads of 150, 250, or 300 bp length.

16S rRNA Gene Sequencing and Species Identification

[0286] Microbial species identification was performed by full-length Sanger sequencing of the 16S rRNA gene using the 27F and 1492 primers (PMID 18296538). Species were identified by performing a bidirectional best-BLAST search against a database of curated 16S rRNA gene sequences of type species. To refine species identities, 16S rRNA gene sequences were inserted into a phylogenetic tree of curated 16S rRNA gene sequences of type species. If the sequence formed a monophyletic cluster with a known species, the strain was assigned to that species. Otherwise, the strain was assigned to a novel species. Optionally, isolates were additionally characterized by whole-genome sequencing. Genome assemblies were inserted into a phylogenetic tree of curated genomes of type species. If the sequence formed a monophyletic cluster with a known species, the strain was assigned to that species. Otherwise, the strain was assigned to a novel species.

TABLE 3
Summary of Isolation/Growth Media for Donor-Derived Isolates

| | | | | Isolated from | Isolated from | |
|---|---|---|---|---|---|---|
| | | | | media | media | |
| | | Stool plating agar media | Additives | containing | containing | Glycerol |
| Strain # | Species ID | type (Vendor, Cat #) | information | oxalate | 2% Ox bile | stock media |
| FBI00001 | Clostridium citroniae | Bifidobacterium Selective | 40 mM | 40 mM | NO | YCFAC + 40 mM |
| | | agar (Anaerobe Systems, | Potassium | | | oxalate |
| | | AS-6423) | oxalate | | | |
| FBI00002 | Bacteroides salyersiae | Bifidobacterium Selective | 40 mM | 40 mM | NO | YCFAC + 40 mM |
| | | agar (Anaerobe Systems, | Potassium | | | oxalate |
| | | AS-6423) | oxalate | | | |
| FBI00003 | Enterococcus faecalis | Bifidobacterium Selective | 40 mM | 40 mM | NO | YCFAC + 40 mM |
| | | agar (Anaerobe Systems, | Potassium | | | oxalate |
| | | AS-6423) | oxalate | | | |
| FBI00004 | Neglecta timonensis | YCFAC-B (Anaerobe | 80 mM | 80 mM | NO | YCFAC + 80 mM |
| | | Systems, AS-677) | Potassium | | | oxalate |
| | | | oxalate | | | |
| FBI00005 | Enterococcus | YCFAC-B (Anaerobe | 80 mM | 80 mM | NO | YCFAC + 80 mM |
| | casseliflavus | Systems, AS-677) | Potassium | | | oxalate |
| | | | oxalate | | | |
| FBI00006 | Enterobacter | YCFAC-B (Anaerobe | 80 mM | 80 mM | NO | YCFAC + 80 mM |
| | himalayensis | Systems, AS-677) | Potassium | | | oxalate |
| | | | oxalate | | | |
| FBI00007 | Enterococcus | YCFAC-B (Anaerobe | 80 mM | 80 mM | NO | YCFAC + 80 mM |
| | casseliflavus | Systems, AS-677) | Potassium | | | oxalate |
| | | | oxalate | | | |
| FBI00008 | Blautia luti | YCFAC-B (Anaerobe | 20 mM | 20 mM | NO | YCFAC + 20 mM |
| | | Systems, AS-677) | Potassium | | | oxalate |
| | | | oxalate | | | |
| FBI00009 | Bifidobacterium | YCFAC-B (Anaerobe | | NO | NO | YCFAC |
| | adolescentis | Systems, AS-677) | | | | |
| FBI00010 | Blautia obeum | YCFAC-B (Anaerobe | | NO | NO | YCFAC |
| | | Systems, AS-677) | | | | |
| FBI00011 | Bifidobacterium longum | Bifidobacterium Selective | | NO | NO | YCFAC |
| | | agar (Anaerobe Systems, | | | | |
| | | AS-6423) | | | | |
| FBI00012 | Alistipes onderdonkii | Bacteroides Bile Esculin | | NO | YES | YCFAC |
| | | (BBE) (Anaerobe Systems, | | | | |
| | | AS-144) | | | | |
| FBI00013 | Parabacteroides merdae | YCFAC-B (Anaerobe | | NO | NO | YCFAC |
| | | Systems, AS-677) | | | | |
| FBI00014 | Blautia luti | YCFAC-B (Anaerobe | 20 mM | 20 mM | NO | YCFAC + 20 mM |
| | | Systems, AS-677) | Potassium | | | oxalate |
| | | | oxalate | | | |
| FBI00015 | Bacteroides uniformis | YCFAC-B (Anaerobe | | NO | NO | YCFAC |
| | | Systems, AS-677) | | | | |
| FBI00016 | Bifidobacterium | YCFAC-B (Anaerobe | | NO | NO | YCFAC |
| | pseudocatenulatum | Systems, AS-677) | | | | |
| FBI00017 | Blautia obeum | YCFAC-B (Anaerobe | 20 mM | 20 mM | NO | YCFAC + 20 mM |
| | | Systems, AS-677) | Potassium | | | oxalate |
| | | | oxalate | | | |
| FBI00018 | Eubacterium rectale | Bifidobacterium Selective | | NO | NO | YCFAC |
| | | agar (Anaerobe Systems, | | | | |
| | | AS-6423) | | | | |
| FBI00019 | Alistipes timonensis | Bacteroides Bile Esculin | | NO | YES | YCFAC |
| | | (BBE) (Anaerobe Systems, | | | | |
| | | AS-144) | | | | |
| FBI00020 | Bacteroides | Bifidobacterium Selective | 40 mM | 40 mM | NO | YCFAC + 40 mM |
| | thetaiotaomicron | agar (Anaerobe Systems, | Potassium | | | oxalate |
| | | AS-6423) | oxalate | | | |
| FBI00021 | Bacteroides kribbi/ | YCFAC-B (Anaerobe | 80 mM | 80 mM | NO | YCFAC + 80 mM |
| | Bacteroides koreensis | Systems, AS-677) | Potassium | | | oxalate |
| | species cluster | | oxalate | | | |
| FBI00022 | Alistipes putredinrs | Bacteroides Bile Esculin | | NO | YES | YCFAC |
| | | (BBE) (Anaerobe Systems, | | | | |
| | | AS-144) | | | | |
| FBI00023 | Enterococcus | Strain Isolation Media 1 | | NO | NO | YCFAC |
| | casseliflavus | (SL1) | | | | |
| FBI00024 | Bacteroides kribbi/ | Chocolate Agar (Teknova, | | NO | NO | YCFAC |
| | Bacteroides koreensis | C4900) | | | | |
| | species cluster | | | | | |
| FBI00025 | Coprococcus comes | Chocolate Agar (Teknova, | | NO | NO | YCFAC |
| | | C4900) | | | | |
| FBI00026 | Enterobacter | YCFAC-BO 200 mM | | 200 mM | NO | YCFAC + 80 mM |
| | hormaechei | (Anaerobe Systems, AS- | | | | oxalate |
| | | 7529) | | | | |
| FBI00027 | Fusicatenibacter | Brain Heart Infusion | | NO | NO | YCFAC |
| | saccharivorans | (BHI), hemin, vitamin K | | | | |
| | | (Teknova, B1093) | | | | |
| FBI00028 | Oscillibacter sp. | Brain Heart Infusion | | NO | NO | YCFAC |
| | FBI00028 | (BHI), hemin, vitamin K | | | | |
| | | (Teknova, B1093) | | | | |
| FBI00029 | Parabacteroides | Brain Heart Infusion | | NO | NO | YCFAC |
| | distasonis | (BHI), hemin, vitamin K | | | | |
| | | (Teknova, B1093) | | | | |
| FBI00030 | Eggerthella lenta | YCFAC-B (Anaerobe | | NO | NO | YCFAC |
| | | Systems, AS-677) | | | | |
| FBI00031 | Enterobacter | YCFAC-BO 200 mM | | 200 mM | NO | YCFAC + 80 mM |
| | hormaechei | (Anaerobe Systems, AS- | | | | oxalate |
| | | 7529) | | | | |
| FBI00032 | Anaerostipes hadrus | Bifidobacterium Selective | | NO | NO | YCFAC |
| | | agar (Anaerobe Systems, | | | | |
| | | AS-6423) | | | | |
| FBI00033 | Lachnospiraceae sp. | YCFAC-B (Anaerobe | 20 mM | 20 mM | NO | YCFAC + 20 mM |
| | FBI00033 | Systems, AS-677) | Potassium | | | oxalate |
| | | | oxalate | | | |
| FBI00034 | Eubacterium eligens | Brain Heart Infusion | | NO | NO | YCFAC |
| | | (BHI), hemin, vitamin K | | | | |
| | | (Teknova, B1093) | | | | |
| FBI00035 | Enterococcus | YCFAC-BO 200 mM | | 200 mM | NO | YCFAC + 80 mM |
| | casseliflavus | (Anaerobe Systems, AS- | | | | oxalate |
| | | 7529) | | | | |
| FBI00036 | Blautia faecis | Chocolate Agar (Teknova, | | NO | NO | YCFAC |
| | | C4900) | | | | |
| FBI00037 | Enterococcus | YCFAC-BO 200 mM | | 200 mM | NO | YCFAC + 80 mM |
| | casseliflavus | (Anaerobe Systems, AS- | | | | oxalate |
| | | 7529) | | | | |
| FBI00038 | Coprococcus eutactus | Chocolate Agar (Teknova, | | NO | NO | YCFAC |
| | | C4900) | | | | |
| FBI00039 | Bacteroides vulgatus | Chocolate Agar (Teknova, | | NO | NO | YCFAC |
| | | C4900) | | | | |
| FBI00040 | Bilophila wadsworthia | Bacteroides Bile Esculin | | NO | YES | YCFAC |
| | | (BBE) (Anaerobe Systems, | | | | |
| | | AS-144) | | | | |
| FBI00041 | Phascolarctobacterium | YCFAC-B (Anaerobe | 80 mM | 80 mM | NO | YCFAC + 80 mM |
| | faecium | Systems, AS-677) | Potassium | | | oxalate |
| | | | oxalate | | | |
| FBI00042 | Bacteroides | Strain Isolation Media 1 | | NO | NO | YCFAC |
| | xylani solvens | (SL1) | | | | |
| FBI00043 | Bifidobacterium | Reinforced Clostridial | | NO | NO | YCFAC |
| | dentium | Agar (RCA) (Teknova, | | | | |
| | | C0205) | | | | |
| FBI00044 | Blautia wexlerae | Chocolate Agar (Teknova, | | NO | NO | YCFAC |
| | | C4900) | | | | |
| FBI00045 | Bifidobacterium | Reinforced Clostridial | | NO | NO | YCFAC |
| | adolescentis | Agar (RCA) (Teknova, | | | | |
| | | C0205) | | | | |
| FBI00046 | Bacteroides caccae | YCFAC-B (Anaerobe | | NO | NO | YCFAC |
| | | Systems, AS-677) | | | | |
| FBI00047 | Eubacterium eligens | YCFAC-B (Anaerobe | | NO | NO | YCFAC |
| | | Systems, AS-677) | | | | |
| FBI00048 | Fusicatenibacter | YCFAC-B (Anaerobe | | NO | NO | YCFAC |
| | saccharivorans | Systems, AS-677) | | | | |
| FBI00049 | Dialister succinatiphilus | YCFAC-B (Anaerobe | | NO | NO | YCFAC |
| | | Systems, AS-677) | | | | |
| FBI00050 | Bacteroides nordii | Bifidobacterium Selective | 40 mM | 40 mM | NO | YCFAC + 40 mM |
| | | agar (Anaerobe Systems, | Potassium | | | oxalate |
| | | AS-6423) | oxalate | | | |
| FBI00051 | Dorea formicigenerans | YCFAC-B (Anaerobe | | NO | NO | YCFAC |
| | | Systems, AS-677) | | | | |
| FBI00052 | Bacteroides | YCFAC-BO 40 mM | | 40 mM | NO | YCFAC + 40 mM |
| | xylanisolvens | (Anaerobe Systems, AS- | | | | oxalate |
| | | 7523) | | | | |
| FBI00053 | Lactobacillus rogosae | YCFAC-BO 40 mM | | 40 mM | NO | YCFAC + 40 mM |
| | | (Anaerobe Systems, AS- | | | | oxalate |
| | | 7523) | | | | |
| FBI00054 | Escherichia flexneri | YCFAC-BO 80 mM | | 80 mM | NO | YCFAC + 80 mM |
| | | (Anaerobe Systems, AS- | | | | oxalate |
| | | 7524) | | | | |
| FBI00055 | Bacteroides kribbi/ | YCFAC-BO 80 mM | | 80 mM | NO | YCFAC + 80 mM |
| | Bacteroides koreensis | (Anaerobe Systems, AS- | | | | oxalate |
| | species cluster | 7524) | | | | |
| FBI00056 | Clostridium citroniae | YCFAC-BO 80 mM | | 80 mM | NO | YCFAC + 80 mM |
| | | (Anaerobe Systems, AS- | | | | oxalate |
| | | 7524) | | | | |
| FBI00057 | Dorea longicatena | Reinforced Clostridial | | NO | NO | YCFAC |
| | | Agar (RCA) (Teknova, | | | | |
| | | C0205) | | | | |
| FBI00058 | Eubacterium rectale | Lactobacillus MRS | 40 mM | 40 mM | NO | YCFAC |
| | | (Anaerobe Systems, AS- | Potassium | | | |
| | | 6429) | oxalate | | | |
| FBI00059 | Bacteroides | Columbia agar, 5% sheep | | NO | NO | YCFAC |
| | stercorirosoris | blood (BD, 221165) | | | | |
| FBI00060 | Bifidobacterium longum | YCFAC-B (Anaerobe | | NO | NO | YCFAC |
| | | Systems, AS-677) | | | | |
| FBI00061 | Alistipes shahii | Bacteroides Bile Esculin | | NO | YES | YCFAC |
| | | (BBE) (Anaerobe Systems, | | | | |
| | | AS-144) | | | | |
| FBI00062 | Collinsella aerofaciens | YCFAC-B (Anaerobe | | NO | NO | YCFAC |
| | | Systems, AS-677) | | | | |
| FBI00063 | Lachnospira sp. | YCFAC-B (Anaerobe | | NO | NO | YCFAC |
| | FBI00063 FBI00285 | Systems, AS-677) | | | | |
| | FBI00364 | | | | | |
| FBI00064 | Dorea sp. FBI00064 | YCFAC-B (Anaerobe | | NO | NO | YCFAC |
| | | Systems, AS-677) | | | | |
| FBI00065 | Sutterellaceae sp. | Bacteroides Bile Esculin | | NO | YES | YCFAC |
| | FBI00065 | (BBE) (Anaerobe Systems, | | | | |
| | | AS-144) | | | | |
| FBI00066 | Parasutterella | Bacteroides Bile Esculin | | NO | YES | YCFAC |
| | excrementihominis | (BBE) (Anaerobe Systems, | | | | |
| | | AS-144) | | | | |
| FBI00067 | Oxalobacter formigenes | YCFAC-BO 40 mM | | 40 mM | NO | YCFAC + 100 |
| | | (Anaerobe Systems, AS- | | | | mM oxalate |
| | | 7523) | | | | |
| FBI00068 | Akkermansia | Strain Isolation Media 1 | | NO | NO | YCFAC |
| | muciniphila | (SL1) | | | | |
| FBI00069 | Ruminococcus bromii | Bifidobacterium Selective | 40 mM | 40 mM | NO | YCFAC |
| | | agar (Anaerobe Systems, | Potassium | | | |
| | | AS-6423) | oxalate | | | |
| FBI00070 | Bacteroides kribbi/ | YCFAC-BO 40 mM | | 40 mM | NO | YCFAC + 40 mM |
| | Bacteroides koreensis | (Anaerobe Systems, AS- | | | | oxalate |
| | species cluster | 7523) | | | | |
| FBI00071 | Lachnospiraceae sp. | YCFAC-B (Anaerobe | | NO | NO | YCFAC |
| | FBI00071 | Systems, AS-677) | | | | |
| FBI00072 | Coprococcus eutactus | Brain Heart Infusion | | NO | NO | YCFAC |
| | | (BHI), hemin, vitamin K | | | | |
| | | (Teknova, B1093) | | | | |
| FBI00073 | Parabacteroides | YCFAC-BO 40 mM | | 40 mM | NO | YCFAC |
| | distasonis | (Anaerobe Systems, AS- | | | | |
| | | 7523) | | | | |
| FBI00074 | Clostridium fessum | Brain Heart Infusion | | NO | NO | YCFAC |
| | | (BHI), hemin, vitamin K | | | | |
| | | (Teknova, B1093) | | | | |
| FBI00075 | Paraprevotella clara | YCFAC-B (Anaerobe | | NO | NO | YCFAC |
| | | Systems, AS-677) | | | | |
| FBI00076 | Bacteroides | YCFAC-BO 80 mM | | 80 mM | NO | YCFAC |
| | thetaiotaomicron | (Anaerobe Systems, AS- | | | | |
| | | 7524) | | | | |
| FBI00077 | Sutterella | Lactobacillus MRS | 20 mM | 20 mM | NO | YCFAC |
| | wadsworthensis | (Anaerobe Systems, AS- | Potassium | | | |
| | | 6429) | oxalate | | | |
| FBI00078 | Blautia obeum | YCFAC-B (Anaerobe | | NO | NO | YCFAC |
| | | Systems, AS-677) | | | | |
| FBI00079 | Clostridium | Chocolate Agar (Teknova, | | NO | NO | YCFAC |
| | clostridioforme | C4900) | | | | |
| FBI00080 | Sutterella massiliensis | Lactobacillus MRS | 40 mM | 40 mM | NO | YCFAC |
| | | (Anaerobe Systems, AS- | Potassium | | | |
| | | 6429) | oxalate | | | |
| FBI00081 | Porphyromonas | Columbia agar, 5% sheep | | NO | NO | YCFAC |
| | asaccharolytica | blood (BD, 221165) | | | | |
| FBI00082 | Ruminococcaceae sp. | Brain Heart Infusion | | NO | NO | YCFAC |
| | FBI00082 FBI00097 | (BHI), hemin, vitamin K | | | | |
| | | (Teknova, B1093) | | | | |
| FBI00083 | Alistipes shahii | Columbia agar, 5% sheep | Antibiotics | NO | NO | YCFAC |
| | | blood (BD, 221165) | | | | |
| FBI00084 | Bifidobacterium longum | Bifidobacterium Selective | | NO | NO | YCFAC |
| | | agar (Anaerobe Systems, | | | | |
| | | AS-6423) | | | | |
| FBI00085 | Ruminococcus bromii | Reinforced Clostridial | | NO | NO | YCFAC |
| | | Agar (RCA) (Teknova, | | | | |
| | | C0205) | | | | |
| FBI00086 | Ruminococcus bromii | Brain Heart Infusion | | NO | NO | YCFAC |
| | | (BHI), hemin, vitamin K | | | | |
| | | (Teknova, B1093) | | | | |
| FBI00087 | Clostridium scindens | Brain Heart Infusion | | NO | NO | YCFAC |
| | | (BHI), hemin, vitamin K | | | | |
| | | (Teknova, B1093) | | | | |
| FBI00088 | Lactobacillus rogosae | Reinforced Clostridial | | NO | NO | YCFAC |
| | | Agar (RCA) (Teknova, | | | | |
| | | C0205) | | | | |
| FBI00089 | Bifidobacterium longum | YCFAC-B (Anaerobe | | NO | NO | YCFAC |
| | | Systems, AS-677) | | | | |
| FBI00090 | Eubacterium eligens | Brain Heart Infusion | | NO | NO | YCFAC |
| | | (BHI), hemin, vitamin K | | | | |
| | | (Teknova, B1093) | | | | |
| FBI00091 | Eubacterium rectale | Brain Heart Infusion | | NO | NO | YCFAC |
| | | (BHI), hemin, vitamin K | | | | |
| | | (Teknova, B1093) | | | | |
| FBI00092 | Monoglobus | YCFAC-BO 40 mM | | 40 mM | NO | YCFAC |
| | pectinilyticus | (Anaerobe Systems, AS- | | | | |
| | | 7523) | | | | |
| FBI00093 | Roseburia hominis | YCFAC-BO 40 mM | | 40 mM | NO | YCFAC |
| | | (Anaerobe Systems, AS- | | | | |
| | | 7523) | | | | |
| FBI00094 | Enterococcus faecium | YCFAC-BO 40 mM | | 40 mM | NO | YCFAC |
| | | (Anaerobe Systems, AS- | | | | |
| | | 7523) | | | | |
| FBI00095 | Ruminococcus bromii | Reinforced Clostridial | | NO | NO | YCFAC |
| | | Agar (RCA) (Teknova, | | | | |
| | | C0205) | | | | |
| FBI00096 | Eggerthella lenta | Brain Heart Infusion | | NO | NO | YCFAC |
| | | (BHI), hemin, vitamin K | | | | |
| | | (Teknova, B1093) | | | | |
| FBI00097 | Ruminococcaceae sp. | Brain Heart Infusion | | NO | NO | YCFAC |
| | FBI00082 FBI00097 | (BHI), hemin, vitamin K | | | | |
| | | (Teknova, B1093) | | | | |
| FBI00098 | Bacteroides dorei | YCFAC-BO 40 mM | | 40 mM | NO | YCFAC |
| | | (Anaerobe Systems, AS- | | | | |
| | | 7523) | | | | |
| FBI00099 | Gordonibacter | Chocolate Agar (Teknova, | | NO | NO | YCFAC |
| | pamelaeae | C4900) | | | | |
| FBI00100 | Lachnospira sp. | Brain Heart Infusion | | NO | NO | YCFAC |
| | FBI00063 FBI00285 | (BHI), hemin, vitamin K | | | | |
| | FBI00364 | (Teknova, B1093) | | | | |
| FBI00101 | Faecalibacterium | Brain Heart Infusion | | NO | NO | YCFAC |
| | prausnitzii | (BHI), hemin, vitamin K | | | | |
| | | (Teknova, B1093) | | | | |
| FBI00102 | Clostridium fessum | YCFAC-BO 40 mM | | 40 mM | NO | YCFAC |
| | | (Anaerobe Systems, AS- | | | | |
| | | 7523) | | | | |
| FBI00103 | Bacteroides massiliensis | Bifidobacterium Selective | | NO | NO | YCFAC |
| | | agar (Anaerobe Systems, | | | | |
| | | AS-6423) | | | | |
| FBI00104 | Blautia wexlerae | Brain Heart Infusion | | NO | NO | YCFAC |
| | | (BHI), hemin, vitamin K | | | | |
| | | (Teknova, B1093) | | | | |
| FBI00105 | Ruminococcaceae sp. | Chocolate Agar (Teknova, | | NO | NO | YCFAC |
| | FBI00105 FBI00160 | C4900) | | | | |
| FBI00106 | Enterococcus durans | Brain Heart Infusion | | NO | NO | YCFAC |
| | | (BHI), hemin, vitamin K | | | | |
| | | (Teknova, B1093) | | | | |
| FBI00107 | Enterococcus durans | YCFAC-BO 80 mM | | 80 mM | NO | YCFAC |
| | | (Anaerobe Systems, AS- | | | | |
| | | 7524) | | | | |
| FBI00108 | Ruminococcaceae sp. | YCFAC-B (Anaerobe | | NO | NO | YCFAC |
| | FBI00108 | Systems, AS-677) | | | | |
| FBI00109 | Coprococcus comes | YCFAC-B (Anaerobe | | NO | NO | YCFAC |
| | | Systems, AS-677) | | | | |
| FBI00110 | Lachnoclostridium | YCFAC-BO 80 mM | | 80 mM | NO | YCFAC |
| | pacaense | (Anaerobe Systems, AS- | | | | |
| | | 7524) | | | | |
| FBI00111 | Bacteroides vulgatus | YCFAC-BO 80 mM | | 80 mM | NO | YCFAC |
| | | (Anaerobe Systems, AS- | | | | |
| | | 7524) | | | | |
| FBI00112 | Bacteroides uniformis | Brain Heart Infusion | | NO | NO | YCFAC |
| | | (BHI), hemin, vitamin K | | | | |
| | | (Teknova, B1093) | | | | |
| FBI00113 | Parabacteroides merdae | Brain Heart Infusion | | NO | NO | YCFAC |
| | | (BHI), hemin, vitamin K | | | | |
| | | (Teknova, B1093) | | | | |
| FBI00114 | Dorea formicigenerans | Brain Heart Infusion | | NO | NO | YCFAC |
| | | (BHI), hemin, vitamin K | | | | |
| | | (Teknova, B1093) | | | | |
| FBI00115 | Dorea formicigenerans | Brain Heart Infusion | | NO | NO | YCFAC |
| | | (BHI), hemin, vitamin K | | | | |
| | | (Teknova, B1093) | | | | |
| FBI00116 | Ruminococcus faecis | Bifidobacterium Selective | 40 mM | 40 mM | NO | YCFAC |
| | | agar (Anaerobe Systems, | Potassium | | | |
| | | AS-6423) | oxalate | | | |
| FBI00117 | Blautia faecis | YCFAC-BO 80 mM | | 80 mM | NO | YCFAC |
| | | (Anaerobe Systems, AS- | | | | |
| | | 7524) | | | | |
| FBI00118 | Blautia faecis | YCFAC-B (Anaerobe | | NO | NO | YCFAC |
| | | Systems, AS-677) | | | | |
| FBI00119 | Blautia obeum | YCFAC-BO 40 mM | | 40 mM | NO | YCFAC |
| | | (Anaerobe Systems, AS- | | | | |
| | | 7523) | | | | |
| FBI00120 | Hungatella effluvii | YCFAC-BO 80 mM | | 80 mM | NO | YCFAC |
| | | (Anaerobe Systems, AS- | | | | |
| | | 7524) | | | | |
| FBI00121 | Bacteroides vulgatus | YCFAC-BO 40 mM | | 40 mM | NO | YCFAC |
| | | (Anaerobe Systems, AS- | | | | |
| | | 7523) | | | | |
| FBI00122 | Bacteroides uniformis | YCFAC-BO 40 mM | | 40 mM | NO | YCFAC |
| | | (Anaerobe Systems, AS- | | | | |
| | | 7523) | | | | |
| FBI00123 | Roseburia hominis | YCFAC-BO 160 mM | | 160 mM | NO | YCFAC |
| | | (Anaerobe Systems, AS- | | | | |
| | | 7527) | | | | |
| FBI00124 | Anaerostipes hadrus | YCFAC-B (Anaerobe | | NO | NO | YCFAC |
| | | Systems, AS-677) | | | | |
| FBI00125 | Bacteroides stercoris | YCFAC-BO 80 mM | | 80 mM | NO | YCFAC |
| | | (Anaerobe Systems, AS- | | | | |
| | | 7524) | | | | |
| FBI00126 | Bifidobacterium | YCFAC-BO 40 mM | | 40 mM | NO | YCFAC |
| | adolescentis | (Anaerobe Systems, AS- | | | | |
| | | 7523) | | | | |
| FBI00127 | Collinsella aerofaciens | YCFAC-B (Anaerobe | | NO | NO | YCFAC |
| | | Systems, AS-677) | | | | |
| FBI00128 | Hungatella effluvii | YCFAC-BO 80 mM | | 80 mM | NO | YCFAC |
| | | (Anaerobe Systems, AS- | | | | |
| | | 7524) | | | | |
| FBI00129 | Escherichia flexneri | YCFAC-BO 200 mM | | 200 mM | NO | YCFAC |
| | | (Anaerobe Systems, AS- | | | | |
| | | 7529) | | | | |
| FBI00130 | Coprococcus comes | YCFAC-B (Anaerobe | | NO | NO | YCFAC |
| | | Systems, AS-677) | | | | |
| FBI00131 | Fusicatenibacter | YCFAC-B (Anaerobe | | NO | NO | YCFAC |
| | saccharivorans | Systems, AS-677) | | | | |
| FBI00132 | Gordonibacter | YCFAC-BO 80 mM | | 80 mM | NO | YCFAC |
| | pamelaeae | (Anaerobe Systems, AS- | | | | |
| | | 7524) | | | | |
| FBI00133 | Oxalobacter formigenes | YCFAC-BO 80 mM | | 80 mM | NO | YCFAC + 100 |
| | | (Anaerobe Systems, AS- | | | | mM oxalate |
| | | 7524) | | | | |
| FBI00134 | Bifidobacterium | YCFAC-B (Anaerobe | | NO | NO | YCFAC |
| | adolescentis | Systems, AS-677) | | | | |
| FBI00135 | Bifidobacterium | YCFAC-B (Anaerobe | | NO | NO | YCFAC |
| | pseudocatenulatum | Systems, AS-677) | | | | |
| FBI00136 | Eisenbergiella tayi | Brain Heart Infusion | | NO | NO | YCFAC |
| | | (BHI), hemin, vitamin K | | | | |
| | | (Teknova, B1093) | | | | |
| FBI00137 | Bacteroides fragilis | YCFAC-BO 40 mM | | 40 mM | NO | YCFAC |
| | | (Anaerobe Systems, AS- | | | | |
| | | 7523) | | | | |
| FBI00138 | Blautia massiliensis | YCFAC-BO 40 mM | | 40 mM | NO | YCFAC |
| | | (Anaerobe Systems, AS- | | | | |
| | | 7523) | | | | |
| FBI00139 | Bacteroides | YCFAC-BO 80 mM | | 80 mM | NO | YCFAC |
| | thetaiotaomicron | (Anaerobe Systems, AS- | | | | |
| | | 7524) | | | | |
| FBI00140 | Phascolarctobacterium | YCFAC-BO 160 mM | | 160 mM | NO | YCFAC + 80 mM |
| | faecium | (Anaerobe Systems, AS- | | | | oxalate |
| | | 7527) | | | | |
| FBI00141 | Phascolarctobacterium | YCFAC-BO 80 mM | | 80 mM | NO | YCFAC + 80 mM |
| | faecium | (Anaerobe Systems, AS- | | | | oxalate |
| | | 7524) | | | | |
| FBI00142 | Clostridium fessum | YCFAC-BO 40 mM | | 40 mM | NO | YCFAC |
| | | (Anaerobe Systems, AS- | | | | |
| | | 7523) | | | | |
| FBI00143 | Parabacteroides merdae | YCFAC-B (Anaerobe | | NO | NO | YCFAC |
| | | Systems, AS-677) | | | | |
| FBI00144 | Holdemanella biformis | Brain Heart Infusion | | NO | NO | YCFAC + |
| | | (BHI), hemin, vitamin K | | | | hemin/vitamin K |
| | | (Teknova, B1093) | | | | |
| FBI00145 | Bifidobacterium | YCFAC-B (Anaerobe | | NO | NO | YCFAC |
| | adolescentis | Systems, AS-677) | | | | |
| FBI00146 | Blautia faecis | YCFAC-BO 80 mM | | 80 mM | NO | YCFAC |
| | | (Anaerobe Systems, AS- | | | | |
| | | 7524) | | | | |
| FBI00147 | Clostridium bolteae | YCFAC-BO 80 mM | | 80 mM | NO | YCFAC |
| | | (Anaerobe Systems, AS- | | | | |
| | | 7524) | | | | |
| FBI00148 | Oscillibacter sp. | Brain Heart Infusion | | NO | NO | YCFAC |
| | FBI00028 | (BHI), hemin, vitamin K | | | | |
| | | (Teknova, B1093) | | | | |
| FBI00149 | Monoglobus | YCFAC-BO 80 mM | | 80 mM | NO | YCFAC |
| | pectinilyticus | (Anaerobe Systems, AS- | | | | |
| | | 7524) | | | | |
| FBI00150 | Lachnospiraceae sp. | YCFAC-B (Anaerobe | | NO | NO | YCFAC |
| | FBI00033 | Systems, AS-677) | | | | |
| FBI00151 | Clostridium aldenense | YCFAC-BO 80 mM | | 80 mM | NO | YCFAC |
| | | (Anaerobe Systems, AS- | | | | |
| | | 7524) | | | | |
| FBI00152 | Dialister invisus | YCFAC-B (Anaerobe | | NO | NO | YCFAC + |
| | | Systems, AS-677) | | | | hemin/vitamin K |
| FBI00153 | Dialister succinatiphilus | YCFAC-BO 80 mM | | 80 mM | NO | YCFAC + 3 mM |
| | | (Anaerobe Systems, AS- | | | | succinate + 7.3 |
| | | 7524) | | | | mM formate |
| FBI00154 | Bacteroides dorei | Brain Heart Infusion | | NO | NO | YCFAC |
| | | (BHI), hemin, vitamin K | | | | |
| | | (Teknova, B1093) | | | | |
| FBI00155 | Blautia obeum | YCFAC-BO 40 mM | | 40 mM | NO | YCFAC |
| | | (Anaerobe Systems, AS- | | | | |
| | | 7523) | | | | |
| FBI00156 | Enterococcus durans | Brain Heart Infusion | | NO | NO | YCFAC |
| | | (BHI), hemin, vitamin K | | | | |
| | | (Teknova, B1093) | | | | |
| FBI00157 | Lachnospiraceae sp. | Bifidobacterium Selective | | NO | NO | YCFAC |
| | FBI00157 | agar (Anaerobe Systems, | | | | |
| | | AS-6423) | | | | |
| FBI00158 | Butyricimonas sp. | Columbia agar, 5% sheep | Antibiotics | NO | NO | YCFAC |
| | FBI00158 | blood (BD, 221165) | | | | |
| FBI00159 | Eisenbergiella tayi | YCFAC-BO 160 mM | | 160 mM | NO | YCFAC |
| | | (Anaerobe Systems, AS- | | | | |
| | | 7527) | | | | |
| FBI00160 | Ruminococcaceae sp. | Brain Heart Infusion | | NO | NO | YCFAC |
| | FBI00105 FBI00160 | (BHI), hemin, vitamin K | | | | |
| | | (Teknova, B1093) | | | | |
| FBI00161 | Bacteroides | Brain Heart Infusion | | NO | NO | YCFAC |
| | cellulosilyticus | (BHI), hemin, vitamin K | | | | |
| | | (Teknova, B1093) | | | | |
| FBI00162 | Bifidobacterium | Reinforced Clostridial | | NO | NO | YCFAC |
| | catenulatum | Agar (RCA) (Teknova, | | | | |
| | | C0205) | | | | |
| FBI00163 | Acidaminococcus | Reinforced Clostridial | | NO | NO | YCFAC |
| | intestini | Agar (RCA) (Teknova, | | | | |
| | | C0205) | | | | |
| FBI00164 | Bacteroides stercoris | Brain Heart Infusion | | NO | NO | YCFAC |
| | | (BHI), hemin, vitamin K | | | | |
| | | (Teknova, B1093) | | | | |
| FBI00165 | Bacteroides massiliensis | Brain Heart Infusion | | NO | NO | YCFAC |
| | | (BHI), hemin, vitamin K | | | | |
| | | (Teknova, B1093) | | | | |
| FBI00166 | Blautia massiliensis | Brain Heart Infusion | | NO | NO | YCFAC |
| | | (BHI), hemin, vitamin K | | | | |
| | | (Teknova, B1093) | | | | |
| FBI00167 | Dorea longicatena | YCFAC-B (Anaerobe | | NO | NO | YCFAC |
| | | Systems, AS-677) | | | | |
| FBI00168 | Collinsella aerofaciens | Reinforced Clostridial | | NO | NO | YCFAC |
| | | Agar (RCA) (Teknova, | | | | |
| | | C0205) | | | | |
| FBI00169 | Parabacteroides | Brain Heart Infusion | | NO | NO | YCFAC |
| | distasonis | (BHI), hemin, vitamin K | | | | |
| | | (Teknova, B1093) | | | | |
| FBI00170 | Eggerthella lenta | YCFAC-BO 80 mM | | 80 mM | NO | YCFAC |
| | | (Anaerobe Systems, AS- | | | | |
| | | 7524) | | | | |
| FBI00171 | Bilophila wadsworthia | YCFAC-BO 80 mM | | 80 mM | NO | YCFAC |
| | | (Anaerobe Systems, AS- | | | | |
| | | 7524) | | | | |
| FBI00172 | Bifidobacterium longum | Reinforced Clostridial | | NO | NO | YCFAC |
| | | Agar (RCA) (Teknova, | | | | |
| | | C0205) | | | | |
| FBI00173 | Bacteroides vulgatus | Bacteroides Bile Esculin | | NO | YES | YCFAC |
| | | (BBE) (Anaerobe Systems, | | | | |
| | | AS-144) | | | | |
| FBI00174 | Lactobacillus rogosae | YCFAC-B (Anaerobe | | NO | NO | YCFAC |
| | | Systems, AS-677) | | | | |
| FBI00175 | Holdemanella biformis | YCFAC-B (Anaerobe | | NO | NO | YCFAC + |
| | | Systems, AS-677) | | | | hemin/vitamin K |
| FBI00176 | Ruthenibacterium | Brain Heart Infusion | | NO | NO | YCFAC |
| | lactatiformans | (BHI), hemin, vitamin K | | | | |
| | | (Teknova, B1093) | | | | |
| FBI00177 | Parasutterella | Bacteroides Bile Esculin | | NO | YES | YCFAC |
| | excrementihominis | (BBE) (Anaerobe Systems, | | | | |
| | | AS-144) | | | | |
| FBI00178 | Bifidobacterium | YCFAC-B (Anaerobe | | NO | NO | YCFAC |
| | adolescentis | Systems, AS-677) | | | | |
| FBI00179 | Bifidobacterium | Reinforced Clostridial | | NO | NO | YCFAC |
| | adolescentis | Agar (RCA) (Teknova, | | | | |
| | | C0205) | | | | |
| FBI00180 | Alistipes sp. FBI00180 | Bacteroides Bile Esculin | | NO | YES | YCFAC |
| | | (BBE) (Anaerobe Systems, | | | | |
| | | AS-144) | | | | |
| FBI00181 | Blautia wexlerae | Brain Heart Infusion | | NO | NO | YCFAC |
| | | (BHI), hemin, vitamin K | | | | |
| | | (Teknova, B1093) | | | | |
| FBI00182 | Bacteroides coprocola | YCFAC-B (Anaerobe | | NO | NO | YCFAC |
| | | Systems, AS-677) | | | | |
| FBI00183 | Bacteroides dorei | Brain Heart Infusion | | NO | NO | YCFAC |
| | | (BHI), hemin, vitamin K | | | | |
| | | (Teknova, B1093) | | | | |
| FBI00184 | Bacteroides faecis | YCFAC-B (Anaerobe | | NO | NO | YCFAC |
| | | Systems, AS-677) | | | | |
| FBI00185 | Eisenbergiella tayi | YCFAC-BO 160 mM | | 160 mM | NO | YCFAC |
| | | (Anaerobe Systems, AS- | | | | |
| | | 7527) | | | | |
| FBI00186 | Coprococcus comes | OxyPras Plus Brucella | | NO | NO | YCFAC |
| | | Blood Agar (Oxyrase, P- | | | | |
| | | BRU-BA) | | | | |
| FBI00187 | Eubacterium rectale | OxyPras Plus Brucella | | NO | NO | YCFAC |
| | | Blood Agar (Oxyrase, P- | | | | |
| | | BRU-BA) | | | | |
| FBI00188 | Blautia faecis | YCFAC-B (Anaerobe | | NO | NO | YCFAC |
| | | Systems, AS-677) | | | | |
| FBI00189 | Bacteroides ovatus | YCFAC-BO 40 mM | | 40 mM | NO | YCFAC |
| | | (Anaerobe Systems, AS- | | | | |
| | | 7523) | | | | |
| FBI00190 | Bacteroides finegoldii | Brain Heart Infusion | | NO | NO | YCFAC |
| | | (BHI), hemin, vitamin K | | | | |
| | | (Teknova, B1093) | | | | |
| FBI00191 | Clostridiaceae sp. | OxyPras Plus Brucella | | NO | NO | YCFAC + |
| | FBI00191 | Blood Agar (Oxyrase, P- | | | | hemin/vitamin K |
| | | BRU-BA) | | | | |
| FBI00192 | Sutterella | YCFAC-B (Anaerobe | | NO | NO | YCFAC |
| | wadsworthensis | Systems, AS-677) | | | | |
| FBI00193 | Alistipes onderdonkii | OxyPras Plus Brucella | | NO | NO | YCFAC |
| | | Blood Agar (Oxyrase, P- | | | | |
| | | BRU-BA) | | | | |
| FBI00194 | Ruminococcus faecis | Brain Heart Infusion | | NO | NO | YCFAC |
| | | (BHI), hemin, vitamin K | | | | |
| | | (Teknova, B1093) | | | | |
| FBI00195 | Parasutterella | YCFAC-B (Anaerobe | | NO | NO | YCFAC |
| | excrementihominis | Systems, AS-677) | | | | |
| FBI00196 | Blautia obeum | Columbia agar, 5% sheep | | NO | NO | YCFAC |
| | | blood (BD, 221165) | | | | |
| FBI00197 | Bifidobacterium | YCFAC-B (Anaerobe | | NO | NO | YCFAC |
| | bifidum | Systems, AS-677) | | | | |
| FBI00198 | Lachnoclostridium | YCFAC-BO 40 mM | | 40 mM | NO | YCFAC |
| | pacaense | (Anaerobe Systems, AS- | | | | |
| | | 7523) | | | | |
| FBI00199 | Clostridium bolteae | YCFAC-BO 40 mM | | 40 mM | NO | YCFAC |
| | | (Anaerobe Systems, AS- | | | | |
| | | 7523) | | | | |
| FBI00200 | Longicatena caecimuris | YCFAC-B (Anaerobe | | NO | NO | YCFAC |
| | | Systems, AS-677) | | | | |
| FBI00201 | Eggerthella lenta | Columbia agar, 5% sheep | | NO | NO | YCFAC |
| | | blood (BD, 221165) | | | | |
| FBI00202 | Erysipelotrichaceae sp. | YCFAC-B (Anaerobe | | NO | NO | YCFAC |
| | FBI00202 | Systems, AS-677) | | | | |
| FBI00203 | Bacteroides kribbi/ | YCFAC-BO 40 mM | | 40 mM | NO | YCFAC |
| | Bacteroides koreensis | (Anaerobe Systems, AS- | | | | |
| | species cluster | 7523) | | | | |
| FBI00204 | Escherichia flexneri | YCFAC-BO 40 mM | | 40 mM | NO | YCFAC |
| | | (Anaerobe Systems, AS- | | | | |
| | | 7523) | | | | |
| FBI00205 | Blautia massiliensis | YCFAC-BO 40 mM | | 40 mM | NO | YCFAC |
| | | (Anaerobe Systems, AS- | | | | |
| | | 7523) | | | | |
| FBI00206 | Bacteroides | YCFAC-BO 40 mM | | 40 mM | NO | YCFAC |
| | xylanisolvens | (Anaerobe Systems, AS- | | | | |
| | | 7523) | | | | |
| FBI00207 | Parabacteroides merdae | YCFAC-B (Anaerobe | | NO | NO | YCFAC |
| | | Systems, AS-677) | | | | |
| FBI00208 | Anaerotruncus | YCFAC-BO 40 mM | | 40 mM | NO | YCFAC |
| | massiliensis | (Anaerobe Systems, AS- | | | | |
| | | 7523) | | | | |
| FBI00209 | Bacteroides salyersiae | YCFAC-BO 40 mM | | 40 mM | NO | YCFAC |
| | | (Anaerobe Systems, AS- | | | | |
| | | 7523) | | | | |
| FBI00210 | Bifidobacterium | YCFAC-B (Anaerobe | | NO | NO | YCFAC |
| | bifidum | Systems, AS-677) | | | | |
| FBI00211 | Bacteroides vulgatus | YCFAC-B (Anaerobe | | NO | NO | YCFAC |
| | | Systems, AS-677) | | | | |
| FBI00212 | Clostridium aldenense | YCFAC-B (Anaerobe | | NO | NO | YCFAC |
| | | Systems, AS-677) | | | | |
| FBI00213 | Ruminococcus bromii | Brain Heart Infusion | | NO | NO | YCFAC |
| | | (BHI), hemin, vitamin K | | | | |
| | | (Teknova, B1093) | | | | |
| FBI00214 | Blautia obeum | YCFAC-BO 40 mM | | 40 mM | NO | YCFAC |
| | | (Anaerobe Systems, AS- | | | | |
| | | 7523) | | | | |
| FBI00215 | Eubacterium rectale | YCFAC-B (Anaerobe | | NO | NO | YCFAC |
| | | Systems, AS-677) | | | | |
| FBI00216 | Blautia faecis | Columbia agar, 5% sheep | | NO | NO | YCFAC |
| | | blood (BD, 221165) | | | | |
| FBI00217 | Alistipes shahii | Bacteroides Bile Esculin | | NO | YES | YCFAC |
| | | (BBE) (Anaerobe Systems, | | | | |
| | | AS-144) | | | | |
| FBI00218 | Bacteroides uniformis | YCFAC-BO 40 mM | | 40 mM | NO | YCFAC |
| | | (Anaerobe Systems, AS- | | | | |
| | | 7523) | | | | |
| FBI00219 | Roseburia hominis | YCFAC-BO 40 mM | | 40 mM | NO | YCFAC |
| | | (Anaerobe Systems, AS- | | | | |
| | | 7523) | | | | |
| FBI00220 | Megasphaera | Brain Heart Infusion | | NO | NO | YCFAC |
| | massiliensis | (BHI), hemin, vitamin K | | | | |
| | | (Teknova, B1093) | | | | |
| FBI00221 | Butyricimonas | Brain Heart Infusion | | NO | NO | YCFAC |
| | faecihominis | (BHI), hemin, vitamin K | | | | |
| | | (Teknova, B1093) | | | | |
| FBI00222 | Alistipes onderdonkii | Brain Heart Infusion | | NO | NO | YCFAC |
| | | (BHI), hemin, vitamin K | | | | |
| | | (Teknova, B1093) | | | | |
| FBI00223 | Alistipes onderdonkii | Brain Heart Infusion | | NO | NO | YCFAC |
| | | (BHI), hemin, vitamin K | | | | |
| | | (Teknova, B1093) | | | | |
| FBI00224 | Sutterella | YCFAC-BO 40 mM | | 40 mM | NO | YCFAC |
| | wadsworthensis | (Anaerobe Systems, AS- | | | | |
| | | 7523) | | | | |
| FBI00225 | Phascolarctobacterium | YCFAC-BO 40 mM | | 40 mM | NO | YCFAC + 80 mM |
| | faecium | (Anaerobe Systems, AS- | | | | oxalate |
| | | 7523) | | | | |
| FBI00226 | Catabacter | YCFAC-BO 40 mM | | 40 mM | NO | YCFAC + |
| | hongkongensis | (Anaerobe Systems, AS- | | | | hemin/vitamin K |
| | | 7523) | | | | |
| FBI00227 | Bacteroides | Brain Heart Infusion | | NO | NO | YCFAC |
| | cellulosilyticus | (BHI), hemin, vitamin K | | | | |
| | | (Teknova, B1093) | | | | |
| FBI00228 | Collinsella aerofaciens | YCFAC-B (Anaerobe | | NO | NO | YCFAC |
| | | Systems, AS-677) | | | | |
| FBI00229 | Alistipes senegalensis | Brain Heart Infusion | | NO | NO | Thioglycollate |
| | | (BHI), hemin, vitamin K | | | | with |
| | | (Teknova, B1093) | | | | hemin/vitamin K |
| FBI00230 | Eisenbergiella tayi | YCFAC-BO 40 mM | | 40 mM | NO | YCFAC |
| | | (Anaerobe Systems, AS- | | | | |
| | | 7523) | | | | |
| FBI00231 | Parabacteroides | Brain Heart Infusion | | NO | NO | YCFAC |
| | distasonis | (BHI), hemin, vitamin K | | | | |
| | | (Teknova, B1093) | | | | |
| FBI00232 | Bacteroides stercoris | Columbia agar, 5% sheep | | NO | NO | YCFAC |
| | | blood (BD, 221165) | | | | |
| FBI00233 | Ruminococcaceae sp. | Brain Heart Infusion | | NO | NO | YCFAC + |
| | FBI00233 | (BHI), hemin, vitamin K | | | | hemin/vitamin K |
| | | (Teknova, B1093) | | | | |
| FBI00234 | Faecalicatena contorta | Columbia agar, 5% sheep | | NO | NO | YCFAC |
| | | blood (BD, 221165) | | | | |
| FBI00235 | Alistipes shahii | Brain Heart Infusion | | NO | NO | YCFAC |
| | | (BHI), hemin, vitamin K | | | | |
| | | (Teknova, B1093) | | | | |
| FBI00236 | Eisenbergiella tayi | YCFAC-BO 40 mM | | 40 mM | NO | YCFAC |
| | | (Anaerobe Systems, AS- | | | | |
| | | 7523) | | | | |
| FBI00237 | Dielma fastidiosa | Brain Heart Infusion | | NO | NO | YCFAC |
| | | (BHI), hemin, vitamin K | | | | |
| | | (Teknova, B1093) | | | | |
| FBI00238 | Alistipes sp. FBI00238 | Columbia agar, 5% sheep | | NO | NO | YCFAC |
| | | blood (BD, 221165) | | | | |
| FBI00239 | Lactonifactor | Brain Heart Infusion | | NO | NO | YCFAC |
| | longoviformis | (BHI), hemin, vitamin K | | | | |
| | | (Teknova, B1093) | | | | |
| FBI00240 | Clostridium citroniae | Brain Heart Infusion | | NO | NO | YCFAC |
| | | (BHI), hemin, vitamin K | | | | |
| | | (Teknova, B1093) | | | | |
| FBI00241 | Collinsella aerofaciens | YCFAC-B (Anaerobe | | NO | NO | YCFAC + |
| | | Systems, AS-677) | | | | hemin/vitamin K |
| FBI00242 | Clostridium aldenense | Brain Heart Infusion | | NO | NO | YCFAC |
| | | (BHI), hemin, vitamin K | | | | |
| | | (Teknova, B1093) | | | | |
| FBI00243 | Eubacterium siraeum | Brain Heart Infusion | | NO | NO | YCFAC, pH 6 |
| | | (BHI), hemin, vitamin K | | | | |
| | | (Teknova, B1093) | | | | |
| FBI00244 | Faecalibacterium | YCFAC-BO 40 mM | | 40 mM | NO | YCFAC, pH 6 |
| | prausnitzii | (Anaerobe Systems, AS- | | | | |
| | | 7523) | | | | |
| FBI00245 | Acidaminococcus | Columbia agar, 5% sheep | | NO | NO | YCFAC + |
| | intestini | blood (BD, 221165) | | | | hemin/vitamin K |
| FBI00246 | Bifidobacterium longum | Brain Heart Infusion | | NO | NO | YCFAC |
| | | (BHI), hemin, vitamin K | | | | |
| | | (Teknova, B1093) | | | | |
| FBI00247 | Phascolarctobacterium | YCFAC-BO 80 mM | | 80 mM | NO | YCFAC + 80 mM |
| | faecium | (Anaerobe Systems, AS- | | | | oxalate |
| | | 7524) | | | | |
| FBI00248 | Neglecta timonensis | Brain Heart Infusion | | NO | NO | YCFAC |
| | | (BHI), hemin, vitamin K | | | | |
| | | (Teknova, B1093) | | | | |
| FBI00249 | Citrobacter | Strain Isolation Media 3 | | NO | NO | YCFAC |
| | portucalensis | (SL3) | | | | |
| FBI00250 | Bifidobacterium | Reinforced Clostridial | | NO | NO | YCFAC |
| | adolescentis | Agar (RCA) (Teknova, | | | | |
| | | C0205) | | | | |
| FBI00251 | Bifidobacterium | Reinforced Clostridial | | NO | NO | YCFAC |
| | pseudocatenulatum | Agar (RCA) (Teknova, | | | | |
| | | C0205) | | | | |
| FBI00252 | Oscillibacter sp. | Columbia agar, 5% sheep | | NO | NO | BHI + hemin/vitK |
| | FBI00028 | blood (BD, 221165) | | | | |
| FBI00253 | Roseburia hominis | Brain Heart Infusion | | NO | NO | YCFAC |
| | | (BHI), hemin, vitamin K | | | | |
| | | (Teknova, B1093) | | | | |
| FBI00254 | Eubacterium hallii | Brain Heart Infusion | | NO | NO | YCFAC |
| | | (BHI), hemin, vitamin K | | | | |
| | | (Teknova, B1093) | | | | |
| FBI00255 | Hungatella effluvii | YCFAC-BO 80 mM | | 80 mM | NO | YCFAC |
| | | (Anaerobe Systems, AS- | | | | |
| | | 7524) | | | | |
| FBI00256 | Blautia faecis | YCFAC-BO 80 mM | | 80 mM | NO | YCFAC |
| | | (Anaerobe Systems, AS- | | | | |
| | | 7524) | | | | |
| FBI00257 | Eubacterium eligens | Strain Isolation Media 3 | | NO | NO | YCFAC |
| | | (SL3) | | | | |
| FBI00258 | Turicibacter sanguinis | Strain Isolation Media 3 | | NO | NO | Thioglycollate |
| | | (SL3) | | | | with |
| | | | | | | hemin/vitamin K |
| FBI00259 | Dorea longicatena | Reinforced Clostridial | | NO | NO | YCFAC |
| | | Agar (RCA) (Teknova, | | | | |
| | | C0205) | | | | |
| FBI00260 | Eubacterium rectale | Brain Heart Infusion | | NO | NO | YCFAC |
| | | (BHI), hemin, vitamin K | | | | |
| | | (Teknova, B1093) | | | | |
| FBI00261 | Bacteroides uniformis | Brain Heart Infusion | | NO | NO | YCFAC |
| | | (BHI), hemin, vitamin K | | | | |
| | | (Teknova, B1093) | | | | |
| FBI00262 | Bacteroides massiliensis | Brain Heart Infusion | | NO | NO | YCFAC |
| | | (BHI), hemin, vitamin K | | | | |
| | | (Teknova, B1093) | | | | |
| FBI00263 | Bacteroides caccae | Strain Isolation Media 3 | | NO | NO | YCFAC |
| | | (SL3) | | | | |
| FBI00264 | Bifidobacterium | Reinforced Clostridial | | NO | NO | YCFAC |
| | adolescentis | Agar (RCA) (Teknova, | | | | |
| | | C0205) | | | | |
| FBI00265 | Bacteroides | YCFAC-BO 80 mM | | 80 mM | NO | YCFAC |
| | cellulosilyticus | (Anaerobe Systems, AS- | | | | |
| | | 7524) | | | | |
| FBI00266 | Coprococcus eutactus | Strain Isolation Media 3 | | NO | NO | YCFAC |
| | | (SL3) | | | | |
| FBI00267 | Anaerofustis | YCFAC-BO 80 mM | | 80 mM | NO | YCFAC |
| | stercorihominis | (Anaerobe Systems, AS- | | | | |
| | | 7524) | | | | |
| FBI00268 | Clostridiales sp. | Brain Heart Infusion | | NO | NO | Thioglycollate |
| | FBI00268 | (BHI), hemin, vitamin K | | | | with |
| | | (Teknova, B1093) | | | | hemin/vitamin K |
| FBI00269 | Alistipes putredinis | Brain Heart Infusion | | NO | NO | YCFAC |
| | | (BHI), hemin, vitamin K | | | | |
| | | (Teknova, B1093) | | | | |
| FBI00270 | Methanobrevibacter | Columbia agar, 5% sheep | Antibiotics | NO | NO | SAB |
| | smithii | blood (BD, 221165) | | | | |
| FBI00271 | Bacteroides | Brain Heart Infusion | | NO | NO | YCFAC |
| | xylanisolvens | (BHI), hemin, vitamin K | | | | |
| | | (Teknova, B1093) | | | | |
| FBI00272 | Clostridiales XIII sp. | Columbia agar, 5% sheep | | NO | NO | Thioglycollate |
| | FBI00272 | blood (BD, 221165) | | | | with |
| | | | | | | hemin/vitamin K |
| FBI00273 | Barnesiella | Brain Heart Infusion | | NO | NO | YCFAC |
| | intestinihominis | (BHI), hemin, vitamin K | | | | |
| | | (Teknova, B1093) | | | | |
| FBI00274 | Eubacterium | YCFAC-BO 80 mM | | 80 mM | NO | YCFAC, pH 6 |
| | xylanophilum | (Anaerobe Systems, AS- | | | | |
| | | 7524) | | | | |
| FBI00275 | Holdemanella biformis | Brain Heart Infusion | | NO | NO | YCFAC + |
| | | (BHI), hemin, vitamin K | | | | hemin/vitamin K |
| | | (Teknova, B1093) | | | | |
| FBI00276 | Dorea formicigenerans | Strain Isolation Media 3 | | NO | NO | YCFAC |
| | | (SL3) | | | | |
| FBI00277 | Alistipes onderdonkii | Brain Heart Infusion | | NO | NO | YCFAC |
| | | (BHI), hemin, vitamin K | | | | |
| | | (Teknova, B1093) | | | | |
| FBI00278 | Eubacterium ventriosum | Brain Heart Infusion | | NO | NO | YCFAC, pH 6 |
| | | (BHI), hemin, vitamin K | | | | |
| | | (Teknova, B1093) | | | | |
| FBI00279 | Coprococcus comes | YCFAC-BO 80 mM | | 80 mM | NO | YCFAC |
| | | (Anaerobe Systems, AS- | | | | |
| | | 7524) | | | | |
| FBI00280 | Bacteroides | YCFAC-BO 80 mM | | 80 mM | NO | YCFAC |
| | thetaiotaomicron | (Anaerobe Systems, AS- | | | | |
| | | 7524) | | | | |
| FBI00281 | Senegalimassilia | Reinforced Clostridial | | NO | NO | YCFAC |
| | anaerobia | Agar (RCA) (Teknova, | | | | |
| | | C0205) | | | | |
| FBI00282 | Porphyromonas | Columbia agar, 5% sheep | | NO | NO | YCFAC |
| | asaccharolytica | blood (BD, 221165) | | | | |
| FBI00283 | Ruminococcus bromii | Brain Heart Infusion | | NO | NO | YCFAC |
| | | (BHI), hemin, vitamin K | | | | |
| | | (Teknova, B1093) | | | | |
| FBI00284 | Blautia obeum | Strain Isolation Media 3 | | NO | NO | YCFAC |
| | | (SL3) | | | | |
| FBI00285 | Lachnospira sp. | Brain Heart Infusion | | NO | NO | YCFAC |
| | FBI00063 FBI00285 | (BHI), hemin, vitamin K | | | | |
| | FBI00364 | (Teknova, B1093) | | | | |
| FBI00286 | Fusicatenibacter | Brain Heart Infusion | | NO | NO | YCFAC |
| | saccharivorans | (BHI), hemin, vitamin K | | | | |
| | | (Teknova, B1093) | | | | |
| FBI00287 | Alistipes shahii | Strain Isolation Media 3 | | NO | NO | YCFAC |
| | | (SL3) | | | | |
| FBI00288 | Blautia | Brain Heart Infusion | | NO | NO | YCFAC |
| | hydrogenotrophica | (BHI), hemin, vitamin K | | | | |
| | | (Teknova, B1093) | | | | |
| FBI00289 | Oxalobacter formigenes | YCFAC-BO 80 mM | | 80 mM | NO | YCFAC + 80 mM |
| | | (Anaerobe Systems, AS- | | | | oxalate |
| | | 7524) | | | | |
| FBI00290 | Lachnospiraceae sp. | Brain Heart Infusion | | NO | NO | YCFAC |
| | FBI00290 | (BHI), hemin, vitamin K | | | | |
| | | (Teknova, B1093) | | | | |
| FBI00291 | Oribacterium sp. | Strain Isolation Media 3 | | NO | NO | YCFAC |
| | FBI00291 | (SL3) | | | | |
| FBI00292 | Methanobrevibacter | Columbia agar, 5% sheep | | NO | NO | SAB |
| | smithii | blood (BD, 221165) | | | | |
| FBI00293 | Bifidobacterium | Reinforced Clostridial | | NO | NO | YCFAC |
| | adolescentis | Agar (RCA) (Teknova, | | | | |
| | | C0205) | | | | |
| FBI00294 | Bacteroides stercoris | YCFAC-B (Anaerobe | | NO | NO | YCFAC |
| | | Systems, AS-677) | | | | |
| FBI00295 | Bifidobacterium | Reinforced Clostridial | | NO | NO | YCFAC |
| | adolescentis | Agar (RCA) (Teknova, | | | | |
| | | C0205) | | | | |
| FBI00296 | Dorea longicatena | Brain Heart Infusion | | NO | NO | YCFAC |
| | | (BHI), hemin, vitamin K | | | | |
| | | (Teknova, B1093) | | | | |
| FBI00297 | Alistipes obesi | Strain Isolation Media 3 | | NO | NO | YCFAC + |
| | | (SL3) | | | | hemin/vitamin K |
| FBI00298 | Faecalibacterium | Brain Heart Infusion | | NO | NO | YCFAC |
| | prausnitzii | (BHI), hemin, vitamin K | | | | |
| | | (Teknova, B1093) | | | | |
| FBI00299 | Streptococcus | Lactobacillus MRS | | NO | NO | YCFAC |
| | pasteurianus | (Anaerobe Systems, AS- | | | | |
| | | 6429) | | | | |
| FBI00300 | Collinsella aerofaciens | Columbia agar, 5% sheep | | NO | NO | YCFAC |
| | | blood (BD, 221165) | | | | |
| FBI00301 | Bifidobacterium | Brain Heart Infusion | | NO | NO | YCFAC |
| | adolescentis | (BHI), hemin, vitamin K | | | | |
| | | (Teknova, B1093) | | | | |
| FBI00302 | Blautia faecis | Columbia agar, 5% sheep | | NO | NO | YCFAC |
| | | blood (BD, 221165) | | | | |
| FBI00303 | Parabacteroides merdae | Brain Heart Infusion | | NO | NO | YCFAC |
| | | (BHI), hemin, vitamin K | | | | |
| | | (Teknova, B1093) | | | | |
| FBI00304 | Dorea longicatena | Strain Isolation Media 3 | | NO | NO | YCFAC |
| | | (SL3) | | | | |
| FBI00305 | Alistipes onderdonkii | Bacteroides Bile Esculin | | NO | YES | YCFAC |
| | | (BBE) (Anaerobe Systems, | | | | |
| | | AS-144) | | | | |
| FBI00306 | Parasutterella | Strain Isolation Media 3 | | NO | NO | BHI + hemin/vitK |
| | excrementihominis | (SL3) | | | | |
| FBI00307 | Parasutterella | Bacteroides Bile Esculin | | NO | YES | BHI + hemin/vitK |
| | excrementihominis | (BBE) (Anaerobe Systems, | | | | |
| | | AS-144) | | | | |
| FBI00308 | Bacteroides vulgatus | YCFAC-B (Anaerobe | | NO | NO | YCFAC |
| | | Systems, AS-677) | | | | |
| FBI00309 | Eubacterium rectale | Brain Heart Infusion | | NO | NO | YCFAC |
| | | (BHI), hemin, vitamin K | | | | |
| | | (Teknova, B1093) | | | | |
| FBI00310 | Butyricimonas | Brain Heart Infusion | | NO | NO | YCFAC |
| | faecihominis | (BHI), hemin, vitamin K | | | | |
| | | (Teknova, B1093) | | | | |
| FBI00311 | Anaerostipes hadrus | YCFAC-B (Anaerobe | | NO | NO | YCFAC |
| | | Systems, AS-677) | | | | |
| FBI00312 | Alistipes shahii | Bacteroides Bile Esculin | | NO | YES | YCFAC |
| | | (BBE) (Anaerobe Systems, | | | | |
| | | AS-144) | | | | |
| FBI00313 | Collinsella aerofaciens | Columbia agar, 5% sheep | | NO | NO | YCFAC |
| | | blood (BD, 221165) | | | | |
| FBI00314 | Anaerotignum | Brain Heart Infusion | | NO | NO | YCFAC |
| | lactatifermentans | (BHI), hemin, vitamin K | | | | |
| | | (Teknova, B1093) | | | | |
| FBI00315 | Blautia obeum | Brain Heart Infusion | | NO | NO | YCFAC |
| | | (BHI), hemin, vitamin K | | | | |
| | | (Teknova, B1093) | | | | |
| FBI00316 | Collinsella aerofaciens | Strain Isolation Media 3 | | NO | NO | YCFAC |
| | | (SL3) | | | | |
| FBI00317 | Bifidobacterium longum | YCFAC-B (Anaerobe | | NO | NO | YCFAC |
| | | Systems, AS-677) | | | | |
| FBI00318 | Collinsella aerofaciens | Brain Heart Infusion | | NO | NO | YCFAC |
| | | (BHI), hemin, vitamin K | | | | |
| | | (Teknova, B1093) | | | | |
| FBI00319 | Collinsella aerofaciens | Columbia agar, 5% sheep | | NO | NO | YCFAC |
| | | blood (BD, 221165) | | | | |
| FBI00320 | Dorea formicigenerans | Strain Isolation Media 3 | | NO | NO | YCFAC |
| | | (SL3) | | | | |
| FBI00321 | Bacteroides vulgatus | Strain Isolation Media 3 | | NO | NO | YCFAC |
| | | (SL3) | | | | |
| FBI00322 | Bifidobacterium | Brain Heart Infusion | | NO | NO | YCFAC |
| | adolescentis | (BHI), hemin, vitamin K | | | | |
| | | (Teknova, B1093) | | | | |
| FBI00323 | Blautia wexlerae | Brain Heart Infusion | | NO | NO | YCFAC |
| | | (BHI), hemin, vitamin K | | | | |
| | | (Teknova, B1093) | | | | |
| FBI00324 | Bilophila wadsworthia | Columbia agar, 5% sheep | | NO | NO | YCFAC |
| | | blood (BD, 221165) | | | | |
| FBI00325 | Alistipes indistinctus | Brain Heart Infusion | | NO | NO | YCFAC + |
| | | (BHI), hemin, vitamin K | | | | hemin/vitamin K |
| | | (Teknova, B1093) | | | | |
| FBI00326 | Bacteroides vulgatus | Chocolate Agar (Teknova, | | NO | NO | YCFAC |
| | | C4900) | | | | |
| FBI00327 | Coprococcus comes | Chocolate Agar (Teknova, | | NO | NO | YCFAC |
| | | C4900) | | | | |
| FBI00328 | Blautia luti | Strain Isolation Media 3 | | NO | NO | YCFAC |
| | | (SL3) | | | | |
| FBI00329 | Alistipes indistinctus | Brain Heart Infusion | | NO | NO | YCFAC |
| | | (BHI), hemin, vitamin K | | | | |
| | | (Teknova, B1093) | | | | |
| FBI00330 | Bifidobacterium longum | Lactobacillus MRS | | NO | NO | YCFAC |
| | | (Anaerobe Systems, AS- | | | | |
| | | 6429) | | | | |
| FBI003 31 | Bacillus circulans | YCFAC-B (Anaerobe | | NO | NO | YCFAC |
| | | Systems, AS-677) | | | | |
| FBI00332 | Clostridium intestinale | YCFAC-B (Anaerobe | | NO | NO | YCFAC |
| | | Systems, AS-677) | | | | |
| FBI00333 | Alistipes onderdonkii | Strain Isolation Media 3 | | NO | NO | YCFAC |
| | | (SL3) | | | | |
| FBI00334 | Bacteroides caccae | Brain Heart Infusion | | NO | NO | YCFAC |
| | | (BHI), hemin, vitamin K | | | | |
| | | (Teknova, B1093) | | | | |
| FBI00335 | Anaerostipes hadrus | Brain Heart Infusion | | NO | NO | YCFAC |
| | | (BHI), hemin, vitamin K | | | | |
| | | (Teknova, B1093) | | | | |
| FBI00336 | Staphylococcus | Brain Heart Infusion | | NO | NO | YCFAC |
| | epidermidis | (BHI), hemin, vitamin K | | | | |
| | | (Teknova, B1093) | | | | |
| FBI00337 | Coprococcus comes | Strain Isolation Media 3 | | NO | NO | YCFAC |
| | | (SL3) | | | | |
| FBI00338 | Blautia obeum | Chocolate Agar (Teknova, | | NO | NO | YCFAC |
| | | C4900) | | | | |
| FBI00339 | Eubacterium rectale | Brain Heart Infusion | | NO | NO | YCFAC |
| | | (BHI), hemin, vitamin K | | | | |
| | | (Teknova, B1093) | | | | |
| FBI00340 | Lachnospiraceae sp. | Brain Heart Infusion | | NO | NO | YCFAC |
| | FBI00033 | (BHI), hemin, vitamin K | | | | |
| | | (Teknova, B1093) | | | | |
| FBI00341 | Lachnospiraceae sp. | Columbia agar, 5% sheep | | NO | NO | YCFAC |
| | FBI00071 | blood (BD, 221165) | | | | |
| FBI00342 | Alistipes indistinctus | Bacteroides Bile Esculin | | NO | YES | YCFAC |
| | | (BBE) (Anaerobe Systems, | | | | |
| | | AS-144) | | | | |
| FBI00343 | Sutterella massiliensis | Brain Heart Infusion | | NO | NO | YCFAC |
| | | (BHI), hemin, vitamin K | | | | |
| | | (Teknova, B1093) | | | | |
| FBI00344 | Alistipes putredinis | Brain Heart Infusion | | NO | NO | YCFAC |
| | | (BHI), hemin, vitamin K | | | | |
| | | (Teknova, B1093) | | | | |
| FBI00345 | Roseburia inulinivorans | Strain Isolation Media 1 | | NO | NO | YCFAC |
| | | (SL1) | | | | |
| FBI00346 | Coriobacteriia sp. | Brain Heart Infusion | | NO | NO | YCFAC |
| | FBI00346 | (BHI), hemin, vitamin K | | | | |
| | | (Teknova, B1093) | | | | |
| FBI00347 | Bacteroides uniformis | Strain Isolation Media 1 | | NO | NO | YCFAC |
| | | (SL1) | | | | |
| FBI00348 | Parabacteroides merdae | Chocolate Agar (Teknova, | | NO | NO | YCFAC |
| | | C4900) | | | | |
| FBI00349 | Holdemanella biformis | Brain Heart Infusion | | NO | NO | BHI + hemin/vitK |
| | | (BHI), hemin, vitamin K | | | | |
| | | (Teknova, B1093) | | | | |
| FBI00350 | Alistipes putredinis | Bacteroides Bile Esculin | | NO | YES | YCFAC |
| | | (BBE) (Anaerobe Systems, | | | | |
| | | AS-144) | | | | |
| FBI00351 | Alistipes obesi | Columbia agar, 5% sheep | | NO | NO | YCFAC |
| | | blood (BD, 221165) | | | | |
| FBI00352 | Collinsella aerofaciens | Columbia agar, 5% sheep | | NO | NO | YCFAC |
| | | blood (BD, 221165) | | | | |
| FBI00353 | Bifidobacterium | Brain Heart Infusion | | NO | NO | YCFAC |
| | adolescentis | (BHI), hemin, vitamin K | | | | |
| | | (Teknova, B1093) | | | | |
| FBI00354 | Bifidobacterium | Strain Isolation Media 3 | | NO | NO | YCFAC |
| | adolescentis | (SL3) | | | | |
| FBI00355 | Blautia massiliensis | Strain Isolation Media 1 | | NO | NO | YCFAC |
| | | (SL1) | | | | |
| FBI00356 | Eubacterium eligens | Brain Heart Infusion | | NO | NO | YCFAC |
| | | (BHI), hemin, vitamin K | | | | |
| | | (Teknova, B1093) | | | | |
| FBI00357 | Bacteroides kribbi/ | Strain Isolation Media 1 | | NO | NO | YCFAC |
| | Bacteroides koreensis | (SL1) | | | | |
| | species cluster | | | | | |
| FBI00358 | Eubacterium hallii | Strain Isolation Media 1 | | NO | NO | YCFAC |
| | | (SL1) | | | | |
| FBI00359 | Eubacterium rectale | Brain Heart Infusion | | NO | NO | YCFAC |
| | | (BHI), hemin, vitamin K | | | | |
| | | (Teknova, B1093) | | | | |
| FBI00360 | Bacteroides massiliensis | Brain Heart Infusion | | NO | NO | YCFAC |
| | | (BHI), hemin, vitamin K | | | | |
| | | (Teknova, B1093) | | | | |
| FBI00361 | Bacteroides stercoris | Strain Isolation Media 3 | | NO | NO | YCFAC |
| | | (SL3) | | | | |
| FBI00362 | Prevotella copri | Chocolate Agar (Teknova, | | NO | NO | Thioglycollate |
| | | C4900) | | | | with |
| | | | | | | hemin/vitamin K |
| FBI00363 | Roseburia intestinalis | Strain Isolation Media 1 | | NO | NO | YCFAC |
| | | (SL1) | | | | |
| FBI00364 | Lachnospira sp. | Brain Heart Infusion | | NO | NO | YCFAC |
| | FBI00063 FBI00285 | (BHI), hemin, vitamin K | | | | |
| | FBI00364 | (Teknova, B1093) | | | | |
| FBI00365 | Paraprevotella clara | Chocolate Agar (Teknova, | | NO | NO | YCFAC |
| | | C4900) | | | | |
| FBI00366 | Eubacterium eligens | Brain Heart Infusion | | NO | NO | YCFAC |
| | | (BHI), hemin, vitamin K | | | | |
| | | (Teknova, B1093) | | | | |
| FBI00367 | Phascolarctobacterium | Strain Isolation Media 1 | | NO | NO | YCFAC |
| | faecium | (SL1) | | | | |
| FBI00368 | Alistipes putredinis | Brain Heart Infusion | | NO | NO | YCFAC |
| | | (BHI), hemin, vitamin K | | | | |
| | | (Teknova, B1093) | | | | |
| FBI00369 | Clostridiales sp. | Brain Heart Infusion | | NO | NO | BHI + hemin/vitK |
| | FBI00369 | (BHI), hemin, vitamin K | | | | |
| | | (Teknova, B1093) | | | | |
| FBI00370 | Bifidobacterium | Columbia agar, 5% sheep | | NO | NO | YCFAC |
| | adolescentis | blood (BD, 221165) | | | | |
| FBI00371 | Bacteroides stercoris | Brain Heart Infusion | | NO | NO | YCFAC |
| | | (BHI), hemin, vitamin K | | | | |
| | | (Teknova, B1093) | | | | |
| FBI00372 | Dorea longicatena | Chocolate Agar (Teknova, | | NO | NO | YCFAC |
| | | C4900) | | | | |
| FBI00373 | Coriobacteriaceae sp. | Columbia agar, 5% sheep | | NO | NO | Thioglycollate |
| | FBI00373 FBI00374 | blood (BD, 221165) | | | | with |
| | | | | | | hemin/vitamin K |
| FBI00374 | Coriobacteriaceae sp. | Columbia agar, 5% sheep | | NO | NO | Thioglycollate |
| | FBI00373 FBI00374 | blood (BD, 221165) | | | | with |
| | | | | | | hemin/vitamin K |
| FBI00375 | Dorea longicatena | Chocolate Agar (Teknova, | | NO | NO | YCFAC |
| | | C4900) | | | | |
| FBI00376 | Dialister succinatiphilus | Brain Heart Infusion | | NO | NO | BHI + hemin/vitK |
| | | (BHI), hemin, vitamin K | | | | |
| | | (Teknova, B1093) | | | | |
| FBI00377 | Clostridiales sp. | Brain Heart Infusion | | NO | NO | Thioglycollate |
| | FBI00377 | (BHI), hemin, vitamin K | | | | with |
| | | (Teknova, B1093) | | | | hemin/vitamin K |

TABLE 4

| | | | | NCBI | | | |
|---|---|---|---|---|---|---|---|
| | | | | Taxonomy | Closest 16S | % Match | SEQ ID |
| Strain # | Species ID | Kingdom | Phylum | ID | Species | (16S) | NO: X |
| FBI00001 | Clostridium citroniae | bacteria | firmicutes | 358743 | Clostridium citroniae | 99.64 | 1 |
| FBI00002 | Bacteroides salyersiae | bacteria | bacteroidetes | 291644 | Bacteroides salyersiae | 99.5 | 2 |
| FBI00003 | Enterococcus faecalis | bacteria | firmicutes | 1351 | Enterococcus faecalis | 99.93 | 3 |
| FBI00004 | Neglecta timonensis | bacteria | firmicutes | 1776382 | Neglecta timonensis | 99.14 | 4 |
| FBI00005 | Enterococcus casseliflavus | bacteria | firmicutes | 37734 | Enterococcus gallinarum | 99.65 | 5 |
| FBI00006 | Enterobacter himalayensis | bacteria | proteobacteria | 547 | Enterobacter hormaechei | 99 | 6 |
| FBI00007 | Enterococcus casseliflavus | bacteria | firmicutes | 37734 | Enterococcus | 99.05 | 7 |
| | | | | | casseliflavus | | |
| FBI00008 | Blautia luti | bacteria | firmicutes | 89014 | Blautia luti | 97.02 | 8 |
| FBI00009 | Bifidobacterium adolescentis | bacteria | actinobacteria | 1680 | Bifidobacterium faecale | 98.6 | 9 |
| FBI00010 | Blautia obeum | bacteria | firmicutes | 40520 | Blautia obeum | 98.12 | 10 |
| FBI00011 | Bifidobacterium longum | bacteria | actinobacteria | 216816 | Bifidobacterium longum | 99.28 | 11 |
| FBI00012 | Alistipes onderdonkii | bacteria | bacteroidetes | 328813 | Alistipes onderdonkii | 99.71 | 12 |
| FBI00013 | Parabacteroides merdae | bacteria | bacteroidetes | 46503 | Parabacteroides merdae | 99.5 | 13 |
| FBI00014 | Blautia luti | bacteria | firmicutes | 89014 | Blautia luti | 97.02 | 14 |
| FBI00015 | Bacteroides uniformis | bacteria | bacteroidetes | 820 | Bacteroides uniformis | 99.78 | 15 |
| FBI00016 | Bifidobacterium | bacteria | actinobacteria | 28026 | Bifidobacterium | 99.64 | 16 |
| | pseudocatenulatum | | | | pseudocatenulatum | | |
| FBI00017 | Blautia obeum | bacteria | firmicutes | 40520 | Blautia obeum | 98.34 | 17 |
| FBI00018 | Eubacterium rectale | bacteria | firmicutes | 39491 | Eubacterium rectale | 99.71 | 18 |
| FBI00019 | Alistipes timonensis | bacteria | bacteroidetes | 1465754 | Alistipes timonensis | 99.78 | 19 |
| FBI00020 | Bacteroides thetaiotaomicron | bacteria | bacteroidetes | 818 | Bacteroides | 99.57 | 20 |
| | | | | | thetaiotaomicron | | |
| FBI00021 | Bacteroides kribbi/ | bacteria | bacteroidetes | 816 | Bacteroides kribbi | 99.07 | 21 |
| | Bacteroides koreensis species | | | | | | |
| | cluster | | | | | | |
| FBI00022 | Alistipes putredinis | bacteria | bacteroidetes | 28117 | Alistipes putredinis | 99.93 | 22 |
| FBI00023 | Enterococcus casseliflavus | bacteria | firmicutes | 37734 | Enterococcus gallinarum | 99.65 | 23 |
| FBI00024 | Bacteroides kribbi/ | bacteria | bacteroidetes | 816 | Bacteroides koreensis | 99.07 | 24 |
| | Bacteroides koreensis species | | | | | | |
| | cluster | | | | | | |
| FBI00025 | Coprococcus comes | bacteria | firmicutes | 410072 | Coprococcus comes | 99.21 | 25 |
| FBI00026 | Enterobacter hormaechei | bacteria | proteobacteria | 158836 | Enterobacter hormaechei | 99.14 | 26 |
| FBI00027 | Fusicatenibacter | bacteria | firmicutes | 1150298 | Fusicatenibacter | 97.6 | 27 |
| | saccharivorans | | | | saccharivorans | | |
| FBI00028 | Oscillibacter sp. FBI00028 | bacteria | firmicutes | 459786 | Oscillibacter | 93.85 | 28 |
| | | | | | valericigenes | | |
| FBI00029 | Parabacteroides distasonis | bacteria | bacteroidetes | 823 | Parabacteroides | 99.26 | 29 |
| | | | | | distasonis | | |
| FBI00030 | Eggerthella lenta | bacteria | firmicutes | 84112 | Eggerthella lenta | 98.47 | 30 |
| FBI00031 | Enterobacter hormaechei | bacteria | proteobacteria | 158836 | Enterobacter hormaechei | 99.43 | 31 |
| FBI00032 | Anaerostipes hadrus | bacteria | firmicutes | 649756 | Anaerostipes hadrus | 99.64 | 32 |
| FBI00033 | Lachnospiraceae sp. | bacteria | firmicutes | 186803 | Clostridium | 93.56 | 33 |
| | FBI00033 | | | | amygdalinum | | |
| FBI00034 | Eubacterium eligens | bacteria | firmicutes | 39485 | Eubacterium eligens | 98.78 | 34 |
| FBI00035 | Enterococcus casseliflavus | bacteria | firmicutes | 37734 | Enterococcus | 98.24 | 35 |
| | | | | | casseliflavus | | |
| FBI00036 | Blautia faecis | bacteria | firmicutes | 871665 | Blautia faecis | 99.53 | 36 |
| FBI00037 | Enterococcus casseliflavus | bacteria | firmicutes | 37734 | Enterococcus gallinarum | 99.65 | 37 |
| FBI00038 | Coprococcus eutactus | bacteria | firmicutes | 33043 | Coprococcus eutactus | 95.96 | 38 |
| FBI00039 | Bacteroides vulgatus | bacteria | bacteroidetes | 821 | Bacteroides vulgatus | 99.71 | 39 |
| FBI00040 | Bilophila wadsworthia | bacteria | proteobacteria | 35833 | Desulfovibrio | 91.38 | 40 |
| | | | | | desulfuricans | | |
| FBI00041 | Phascolarctobacterium | bacteria | firmicutes | 33025 | Phascolarctobacterium | 99.23 | 41 |
| | faecium | | | | faecium | | |
| FBI00042 | Bacteroides xylanisolvens | bacteria | bacteroidetes | 371601 | Bacteroides | 99.71 | 42 |
| | | | | | xylanisolvens | | |
| FBI00043 | Bifidobacterium dentium | bacteria | actinobacteria | 1689 | Bifidobacterium | 99.35 | 43 |
| | | | | | dentium | | |
| FBI00044 | Blautia wexlerae | bacteria | firmicutes | 418240 | Blautia wexlerae | 98.69 | 44 |
| FBI00045 | Bifidobacterium adolescentis | bacteria | actinobacteria | 1680 | Bifidobacterium faecale | 99.56 | 45 |
| FBI00046 | Bacteroides caccae | bacteria | bacteroidetes | 47678 | Bacteroides caccae | 99.71 | 46 |
| FBI00047 | Eubacterium eligens | bacteria | firmicutes | 39485 | Eubacterium eligens | 98.79 | 47 |
| FBI00048 | Fusicatenibacter | bacteria | firmicutes | 1150298 | Fusicatenibacter | 97.95 | 48 |
| | saccharivorans | | | | saccharivorans | | |
| FBI00049 | Dialister succinatiphilus | bacteria | firmicutes | 487173 | Dialister succinatiphilus | 95.74 | 49 |
| FBI00050 | Bacteroides nordii | bacteria | bacteroidetes | 291645 | Bacteroides nordii | 98.63 | 50 |
| FBI00051 | Dorea formicigenerans | bacteria | firmicutes | 39486 | Dorea formicigenerans | 98.07 | 51 |
| FBI00052 | Bacteroides xylanisolvens | bacteria | bacteroidetes | 371601 | Bacteroides | 99.14 | 52 |
| | | | | | xylanisolvens | | |
| FBI00053 | Lactobacillus rogosae | bacteria | firmicutes | 706562 | Lachnospira | 97.36 | 53 |
| | | | | | pectinoschiza | | |
| FBI00054 | Escherichia flexneri | bacteria | proteobacteria | 623 | Escherichia fergusonii | 99.71 | 54 |
| FBI00055 | Bacteroides kribbi/ | bacteria | bacteroidetes | 816 | Bacteroides kribbi | 99.64 | 55 |
| | Bacteroides koreensis species | | | | | | |
| | cluster | | | | | | |
| FBI00056 | Clostridium citroniae | bacteria | firmicutes | 358743 | Clostridium citroniae | 99.2 | 56 |
| FBI00057 | Dorea longicatena | bacteria | firmicutes | 88431 | Dorea longicatena | 99.7 | 57 |
| FBI00058 | Eubacterium rectale | bacteria | firmicutes | 39491 | Eubacterium rectale | 99.71 | 58 |
| FBI00059 | Bacteroides stercorirosoris | bacteria | bacteroidetes | 871324 | Bacteroides oleiciplenus | 98.81 | 59 |
| FBI00060 | Bifidobacterium longum | bacteria | actinobacteria | 216816 | Bifidobacterium longum | 99.49 | 60 |
| FBI00061 | Alistipes shahii | bacteria | bacteroidetes | 328814 | Alistipes shahii | 99.19 | 61 |
| FBI00062 | Collinsella aerofaciens | bacteria | actinobacteria | 74426 | Collinsella aerofaciens | 99.48 | 62 |
| FBI00063 | Lachnospira sp. FBI00063 | bacteria | firmicutes | 28050 | Lactobacillus rogosae | 95.3 | 63 |
| | FBI00285 FBI00364 | | | | | | |
| FBI00064 | Dorea sp. FBI00064 | bacteria | firmicutes | 189330 | Ruminococcus gnavus | 95.58 | 64 |
| FBI00065 | Sutterellaceae sp. FBI00065 | bacteria | proteobacteria | 995019 | Turicimonas muris | 91.55 | 65 |
| FBI00066 | Parasutterella | bacteria | proteobacteria | 487175 | Parasutterella | 99.13 | 66 |
| | excrementihominis | | | | excrementihominis | | |
| FBI00067 | Oxalobacter formigenes | bacteria | proteobacteria | 847 | Oxalobacter formigenes | 98.84 | 67 |
| FBI00068 | Akkermansia muciniphila | bacteria | vemicomicrobia | 239935 | Akkermansia | 99.42 | 68 |
| | | | | | muciniphila | | |
| FBI00069 | Ruminococcus bromii | bacteria | firmicutes | 40518 | Ruminococcus bromii | 98.84 | 69 |
| FBI00070 | Bacteroides kribbi/ | bacteria | bacteroidetes | 816 | Bacteroides koreensis | 99.71 | 70 |
| | Bacteroides koreensis species | | | | | | |
| | cluster | | | | | | |
| FBI00071 | Lachnospiraceae sp. | bacteria | firmicutes | 186803 | Roseburia faecis | 94.92 | 71 |
| | FBI00071 | | | | | | |
| FBI00072 | Coprococcus eutactus | bacteria | firmicutes | 33043 | Coprococcus eutactus | 96.17 | 72 |
| FBI00073 | Parabacteroides distasonis | bacteria | bacteroidetes | 823 | Parabacteroides | 98.99 | 73 |
| | | | | | distasonis | | |
| FBI00074 | Clostridium fessum | bacteria | firmicutes | 2126740 | Clostridium symbiosum | 94.03 | 74 |
| FBI00075 | Paraprevotella clara | bacteria | bacteroidetes | 454154 | Paraprevotella clara | 98.85 | 75 |
| FBI00076 | Bacteroides thetaiotaomicron | bacteria | bacteroidetes | 818 | Bacteroides | 99.78 | 76 |
| | | | | | thetaiotaomicron | | |
| FBI00077 | Sutterella wadsworthensis | bacteria | proteobacteria | 40545 | Sutterella | 99.86 | 77 |
| | | | | | wadsworthensis | | |
| FBI00078 | Blautia obeum | bacteria | firmicutes | 40520 | Blautia obeum | 98.34 | 78 |
| FBI00079 | Clostridium clostridioforme | bacteria | firmicutes | 1531 | Clostridium | 99.14 | 79 |
| | | | | | clostridioforme | | |
| FBI00080 | Sutterella massiliensis | bacteria | proteobacteria | 1816689 | Sutterella massiliensis | 99.78 | 80 |
| FBI00081 | Porphyromonas | bacteria | bacteroidetes | 28123 | Porphyromonas | 99.35 | 81 |
| | asaccharolytica | | | | asaccharolytica | | |
| FBI00082 | Ruminococcaceae sp. | bacteria | firmicutes | 541000 | Phocea massiliensis | 93.08 | 82 |
| | FBI00082 FBI00097 | | | | | | |
| FBI00083 | Alistipes shahii | bacteria | bacteroidetes | 328814 | Alistipes shahii | 99.64 | 83 |
| FBI00084 | Bifidobacterium longum | bacteria | actinobacteria | 216816 | Bifidobacterium longum | 98.07 | 84 |
| FBI00085 | Ruminococcus bromii | bacteria | firmicutes | 40518 | Ruminococcus bromii | 98.62 | 85 |
| FBI00086 | Ruminococcus bromii | bacteria | firmicutes | 40518 | Ruminococcus bromii | 98.77 | 86 |
| FBI00087 | Clostridium scindens | bacteria | firmicutes | 29347 | Clostridium scindens | 98.28 | 87 |
| FBI00088 | Lactobacillus rogosae | bacteria | firmicutes | 706562 | Lactobacillus rogosae | 99.64 | 88 |
| FBI00089 | Bifidobacterium longum | bacteria | actinobacteria | 216816 | Bifidobacterium longum | 98.49 | 89 |
| FBI00090 | Eubacterium eligens | bacteria | firmicutes | 39485 | Eubacterium eligens | 98.71 | 90 |
| FBI00091 | Eubacterium rectale | bacteria | firmicutes | 39491 | Eubacterium rectale | 99.86 | 91 |
| FBI00092 | Monoglobus pectinilyticus | bacteria | firmicutes | 1981510 | Monoglobus | 99.5 | 92 |
| | | | | | pectinilyticus | | |
| FBI00093 | Roseburia hominis | bacteria | firmicutes | 301301 | Roseburia hominis | 99.71 | 93 |
| FBI00094 | Enterococcus faecium | bacteria | firmicutes | 1352 | Enterococcus faecium | 99.38 | 94 |
| FBI00095 | Ruminococcus bromii | bacteria | firmicutes | 40518 | Ruminococcus bromii | 98.7 | 95 |
| FBI00096 | Eggerthella lenta | bacteria | actinobacteria | 84112 | Eggerthella lenta | 98.76 | 96 |
| FBI00097 | Ruminococcaceae sp. | bacteria | firmicutes | 541000 | Phocea massiliensis | 93.07 | 97 |
| | FBI00082 FBI00097 | | | | | | |
| FBI00098 | Bacteroides dorei | bacteria | bacteroidetes | 357276 | Bacteroides dorei | 99.93 | 98 |
| FBI00099 | Gordonibacter pamelaeae | bacteria | actinobacteria | 471189 | Gordonibacter | 99.56 | 99 |
| | | | | | pamelaeae | | |
| FBI00100 | Lachnospira sp. FBI00063 | bacteria | firmicutes | 28050 | Lactobacillus rogosae | 95.35 | 100 |
| | FBI00285 FBI00364 | | | | | | |
| FBI00101 | Faecalibacterium prausnitzii | bacteria | firmicutes | 853 | Faecalibacterium | 97.97 | 101 |
| | | | | | prausnitzii | | |
| FBI00102 | Clostridium fessum | bacteria | firmicutes | 2126740 | Clostridium symbiosum | 94.31 | 102 |
| FBI00103 | Bacteroides massiliensis | bacteria | bacteroidetes | 204516 | Bacteroides massiliensis | 99.86 | 103 |
| FBI00104 | Blautia wexlerae | bacteria | firmicutes | 418240 | Blautia luti | 97.18 | 104 |
| FBI00105 | Ruminococcaceae sp. | bacteria | firmicutes | 541000 | Pseudoflavonifractor | 95.06 | 105 |
| | FBI00105 FBI00160 | | | | phocaeensis | | |
| FBI00106 | Enterococcus durans | bacteria | firmicutes | 53345 | Enterococcus lactis | 96.68 | 106 |
| FBI00107 | Enterococcus durans | bacteria | firmicutes | 53345 | Enterococcus faecium | 98.83 | 107 |
| FBI00108 | Ruminococcaceae sp. | bacteria | firmicutes | 541000 | Gemmiger formicilis | 96.96 | 108 |
| | FBI00108 | | | | | | |
| FBI00109 | Coprococcus comes | bacteria | firmicutes | 410072 | Coprococcus comes | 98.39 | 109 |
| FBI00110 | Lachnoclostridium pacaense | bacteria | firmicutes | 1917870 | Lachnoclostridium | 98.92 | 110 |
| | | | | | pacaense | | |
| FBI00111 | Bacteroides vulgatus | bacteria | bacteroidetes | 821 | Bacteroides vulgatus | 99.43 | 111 |
| FBI00112 | Bacteroides uniformis | bacteria | bacteroidetes | 820 | Bacteroides uniformis | 99.78 | 112 |
| FBI00113 | Parabacteroides merdae | bacteria | bacteroidetes | 46503 | Parabacteroides merdae | 99.79 | 113 |
| FBI00114 | Dorea formicigenerans | bacteria | firmicutes | 39486 | Dorea formicigenerans | 97.83 | 114 |
| FBI00115 | Dorea formicigenerans | bacteria | firmicutes | 39486 | Dorea formicigenerans | 97.98 | 115 |
| FBI00116 | Ruminococcus faecis | bacteria | firmicutes | 592978 | Ruminococcus faecis | 99.57 | 116 |
| FBI00117 | Blautia faecis | bacteria | firmicutes | 871665 | Blautia faecis | 99.52 | 117 |
| FBI00118 | Blautia faecis | bacteria | firmicutes | 871665 | Blautia faecis | 99.84 | 118 |
| FBI00119 | Blautia obeum | bacteria | firmicutes | 40520 | Blautia obeum | 98.02 | 119 |
| FBI00120 | Hungatella effluvii | bacteria | firmicutes | 154046 | Hungatella hathewayi | 98.78 | 120 |
| FBI00121 | Bacteroides vulgatus | bacteria | bacteroidetes | 821 | Bacteroides vulgatus | 99.86 | 121 |
| FBI00122 | Bacteroides uniformis | bacteria | bacteroidetes | 820 | Bacteroides uniformis | 99.57 | 122 |
| FBI00123 | Roseburia hominis | bacteria | firmicutes | 301301 | Roseburia hominis | 100 | 123 |
| FBI00124 | Anaerostipes hadrus | bacteria | firmicutes | 649756 | Anaerostipes hadrus | 99.86 | 124 |
| FBI00125 | Bacteroides stercoris | bacteria | bacteroidetes | 46506 | Bacteroides stercoris | 99.64 | 125 |
| FBI00126 | Bifidobacterium adolescentis | bacteria | actinobacteria | 1680 | Bifidobacterium | 98.98 | 126 |
| | | | | | adolescentis | | |
| FBI00127 | Collinsella aerofaciens | bacteria | actinobacteria | 74426 | Collinsella aerofaciens | 98.81 | 127 |
| FBI00128 | Hungatella effluvii | bacteria | firmicutes | 1096246 | Hungatella effluvii | 98.71 | 128 |
| FBI00129 | Escherichia flexneri | bacteria | proteobacteria | 623 | Escherichia fergusonii | 99.43 | 129 |
| FBI00130 | Coprococcus comes | bacteria | firmicutes | 410072 | Coprococcus comes | 99.35 | 130 |
| FBI00131 | Fusicatenibacter | bacteria | firmicutes | 1150298 | Fusicatenibacter | 99.2 | 131 |
| | saccharivorans | | | | saccharivorans | | |
| FBI00132 | Gordonibacter pamelaeae | bacteria | actinobacteria | 471189 | Gordonibacter | 99.48 | 132 |
| | | | | | pamelaeae | | |
| FBI00133 | Oxalobacter formigenes | bacteria | proteobacteria | 847 | Oxalobacter formigenes | 99.21 | 133 |
| FBI00134 | Bifidobacterium adolescentis | bacteria | actinobacteria | 1680 | Bifidobacterium faecale | 98.92 | 134 |
| FBI00135 | Bifidobacterium | bacteria | actinobacteria | 28026 | Bifidobacterium | 99.57 | 135 |
| | pseudocatenulatum | | | | pseudocatenulatum | | |
| FBI00136 | Eisenbergiella tayi | bacteria | firmicutes | 1432052 | Eisenbergiella tayi | 99.77 | 136 |
| FBI00137 | Bacteroides fragilis | bacteria | bacteroidetes | 817 | Bacteroides fragilis | 99.71 | 137 |
| FBI00138 | Blautia massiliensis | bacteria | firmicutes | 1737424 | Blautia luti | 97.94 | 138 |
| FBI00139 | Bacteroides thetaiotaomicron | bacteria | bacteroidetes | 818 | Bacteroides | 99.5 | 139 |
| | | | | | thetaiotaomicron | | |
| FBI00140 | Phascolarctobacterium | bacteria | firmicutes | 33025 | Phascolarctobacterium | 99.58 | 140 |
| | faecium | | | | faecium | | |
| FBI00141 | Phascolarctobacterium | bacteria | firmicutes | 33025 | Phascolarctobacterium | 99.15 | 141 |
| | faecium | | | | faecium | | |
| FBI00142 | Clostridium fessum | bacteria | firmicutes | 2126740 | Clostridium symbiosum | 94.07 | 142 |
| FBI00143 | Parabacteroides merdae | bacteria | bacteroidetes | 46503 | Parabacteroides merdae | 99.07 | 143 |
| FBI00144 | Holdemanella biformis | bacteria | firmicutes | 1735 | Holdemanella biformis | 97.73 | 144 |
| FBI00145 | Bifidobacterium adolescentis | bacteria | actinobacteria | 1680 | Bifidobacterium | 99.14 | 145 |
| | | | | | adolescentis | | |
| FBI00146 | Blautia faecis | bacteria | firmicutes | 871665 | Blautia faecis | 99.68 | 146 |
| FBI00147 | Clostridium bolteae | bacteria | firmicutes | 208479 | Clostridium bolteae | 99.28 | 147 |
| FBI00148 | Oscillibacter sp. FBI00028 | bacteria | firmicutes | 459786 | Oscillibacter | 94.28 | 148 |
| | | | | | ruminantium | | |
| FBI00149 | Monoglobus pectinilyticus | bacteria | firmicutes | 1981510 | Monoglobus | 99.5 | 149 |
| | | | | | pectinilyticus | | |
| FBI00150 | Lachnospiraceae sp. | bacteria | firmicutes | 186803 | Clostridium | 93.55 | 150 |
| | FBI00033 | | | | amygdalinum | | |
| FBI00151 | Clostridium aldenense | bacteria | firmicutes | 358742 | Clostridium aldenense | 98.55 | 151 |
| FBI00152 | Dialister invisus | bacteria | firmicutes | 218538 | Dialister invisus | 99.58 | 152 |
| FBI00153 | Dialister succinatiphilus | bacteria | firmicutes | 487173 | Dialister succinatiphilus | 95.72 | 153 |
| FBI00154 | Bacteroides dorei | bacteria | bacteroidetes | 357276 | Bacteroides dorei | 100 | 154 |
| FBI00155 | Blautia obeum | bacteria | firmicutes | 40520 | Blautia obeum | 98.7 | 155 |
| FBI00156 | Enterococcus durans | bacteria | firmicutes | 53345 | Enterococcus sp. | 96.45 | 156 |
| FBI00157 | Lachnospiraceae sp. | bacteria | firmicutes | 186803 | Cuneatibacter | 91.24 | 157 |
| | FBI00157 | | | | caecimuris | | |
| FBI00158 | Butyricimonas sp. FBI00158 | bacteria | bacteroidetes | 574697 | Butyricimonas sp. | 97.54 | 158 |
| FBI00159 | Eisenbergiella tayi | bacteria | firmicutes | 1432052 | Eisenbergiella tayi | 99.03 | 159 |
| FBI00160 | Ruminococcaceae sp. | bacteria | firmicutes | 541000 | Pseudoflavonifractor | 97.17 | 160 |
| | FBI00105 FBI00160 | | | | capillosus | | |
| FBI00161 | Bacteroides cellulosilyticus | bacteria | bacteroidetes | 246787 | Bacteroides | 99.14 | 161 |
| | | | | | cellulosilyticus | | |
| FBI00162 | Bifidobacterium catenulatum | bacteria | actinobacteria | 1686 | Bifidobacterium | 99.14 | 162 |
| | | | | | catenulatum | | |
| FBI00163 | Acidaminococcus intestini | bacteria | firmicutes | 187327 | Acidaminococcus | 99.72 | 163 |
| | | | | | intestini | | |
| FBI00164 | Bacteroides stercoris | bacteria | bacteroidetes | 46506 | Bacteroides stercoris | 98.56 | 164 |
| FBI00165 | Bacteroides massiliensis | bacteria | bacteroidetes | 204516 | Bacteroides massiliensis | 99.71 | 165 |
| FBI00166 | Blautia massiliensis | bacteria | firmicutes | 1737424 | Blautia luti | 97.55 | 166 |
| FBI00167 | Dorea longicatena | bacteria | firmicutes | 88431 | Dorea longicatena | 99.39 | 167 |
| FBI00168 | Collinsella aerofaciens | bacteria | actinobacteria | 74426 | Collinsella aerofaciens | 99.26 | 168 |
| FBI00169 | Parabacteroides distasonis | bacteria | bacteroidetes | 823 | Parabacteroides | 98.7 | 169 |
| | | | | | distasonis | | |
| FBI00170 | Eggerthella lenta | bacteria | actinobacteria | 84112 | Eggerthella lenta | 98.61 | 170 |
| FBI00171 | Bilophila wadsworthia | bacteria | proteobacteria | 35833 | Desulfovibrio | 91.45 | 171 |
| | | | | | desulfuricans | | |
| FBI00172 | Bifidobacterium longum | bacteria | actinobacteria | 216816 | Bifidobacterium longum | 99.05 | 172 |
| FBI00173 | Bacteroides vulgatus | bacteria | bacteroidetes | 821 | Bacteroides vulgatus | 100 | 173 |
| FBI00174 | Lactobacillus rogosae | bacteria | firmicutes | 706562 | Lachnospira | 97.92 | 174 |
| | | | | | pectinoschiza | | |
| FBI00175 | Holdemanella biformis | bacteria | firmicutes | 1735 | Holdemanella biformis | 98.19 | 175 |
| FBI00176 | Ruthenibacterium | bacteria | firmicutes | 1550024 | Ruthenibacterium | 99.71 | 176 |
| | lactatiformans | | | | lactatiformans | | |
| FBI00177 | Parasutterella | bacteria | proteobacteria | 487175 | Parasutterella | 99.71 | 177 |
| | excrementihominis | | | | excrementihominis | | |
| FBI00178 | Bifidobacterium adolescentis | bacteria | actinobacteria | 1680 | Bifidobacterium faecale | 98.99 | 178 |
| FBI00179 | Bifidobacterium adolescentis | bacteria | actinobacteria | 1680 | Bifidobacterium faecale | 98.91 | 179 |
| FBI00180 | Alistipes sp. FBI00180 | bacteria | bacteroidetes | 239759 | Alistipes senegalensis | 97.56 | 180 |
| FBI00181 | Blautia wexlerae | bacteria | firmicutes | 418240 | Blautia wexlerae | 97.17 | 181 |
| FBI00182 | Bacteroides coprocola | bacteria | bacteroidetes | 310298 | Bacteroides coprocola | 99.64 | 182 |
| FBI00183 | Bacteroides dorei | bacteria | bacteroidetes | 357276 | Bacteroides dorei | 99.86 | 183 |
| FBI00184 | Bacteroides faecis | bacteria | bacteroidetes | 674529 | Bacteroides faecis | 99.78 | 184 |
| FBI00185 | Eisenbergiella tayi | bacteria | firmicutes | 1432052 | Eisenbergiella tayi | 98.96 | 185 |
| FBI00186 | Coprococcus comes | bacteria | firmicutes | 410072 | Coprococcus comes | 99.06 | 186 |
| FBI00187 | Eubacterium rectale | bacteria | firmicutes | 39491 | Eubacterium rectale | 99.57 | 187 |
| FBI00188 | Blautia faecis | bacteria | firmicutes | 871665 | Blautia faecis | 99.05 | 188 |
| FBI00189 | Bacteroides ovatus | bacteria | bacteroidetes | 28116 | Bacteroides koreensis | 99.93 | 189 |
| FBI00190 | Bacteroides finegoldii | bacteria | bacteroidetes | 338188 | Bacteroides finegoldii | 98.91 | 190 |
| FBI00191 | Clostridiaceae sp. FBI00191 | bacteria | firmicutes | 31979 | Clostridium | 96.24 | 191 |
| | | | | | swellfunianum | | |
| FBI00192 | Sutterella wadsworthensis | bacteria | proteobacteria | 40545 | Sutterella | 99.71 | 192 |
| | | | | | wadsworthensis | | |
| FBI00193 | Alistipes onderdonkii | bacteria | bacteroidetes | 328813 | Alistipes onderdonkii | 99.64 | 193 |
| FBI00194 | Ruminococcus faecis | bacteria | firmicutes | 592978 | Ruminococcus faecis | 98.41 | 194 |
| FBI00195 | Parasutterella | bacteria | proteobacteria | 487175 | Parasutterella | 99.06 | 195 |
| | excrementihominis | | | | excrementihominis | | |
| FBI00196 | Blautia obeum | bacteria | firmicutes | 40520 | Blautia obeum | 98.3 | 196 |
| FBI00197 | Bifidobacterium bifidum | bacteria | actinobacteria | 1681 | Bifidobacterium bifidum | 99.85 | 197 |
| FBI00198 | Lachnoclostridium pacaense | bacteria | firmicutes | 1917870 | Lachnoclostridium | 99.71 | 198 |
| | | | | | pacaense | | |
| FBI00199 | Clostridium bolteae | bacteria | firmicutes | 208479 | Clostridium bolteae | 99.28 | 199 |
| FBI00200 | Longicatena caecimuris | bacteria | firmicutes | 1796635 | Longicatena caecimuris | 99.71 | 200 |
| FBI00201 | Eggerthella lenta | bacteria | actinobacteria | 84112 | Eggerthella lenta | 98.83 | 201 |
| FBI00202 | Erysipelotrichaceae sp. | bacteria | firmicutes | 128827 | Longibaculum muris | 92.85 | 202 |
| | FBI00202 | | | | | | |
| FBI00203 | Bacteroides kribbi/ | bacteria | bacteroidetes | 816 | Bacteroides koreensis | 100 | 203 |
| | Bacteroides koreensis species | | | | | | |
| | cluster | | | | | | |
| FBI00204 | Escherichia flexneri | bacteria | proteobacteria | 623 | Escherichia fergusonii | 98.98 | 204 |
| FBI00205 | Blautia massiliensis | bacteria | firmicutes | 1737424 | Blautia luti | 97.55 | 205 |
| FBI00206 | Bacteroides xylanisolvens | bacteria | bacteroidetes | 371601 | Bacteroides | 99.56 | 206 |
| | | | | | xylanisolvens | | |
| FBI00207 | Parabacteroides merdae | bacteria | bacteroidetes | 46503 | Parabacteroides merdae | 99.49 | 207 |
| FBI00208 | Anaerotruncus massiliensis | bacteria | firmicutes | 1673720 | Anaerotruncus | 96.52 | 208 |
| | | | | | colihominis | | |
| FBI00209 | Bacteroides salyersiae | bacteria | bacteroidetes | 291644 | Bacteroides salyersiae | 99.63 | 209 |
| FBI00210 | Bifidobacterium bifidum | bacteria | actinobacteria | 1681 | Bifidobacterium bifidum | 99.93 | 210 |
| FBI00211 | Bacteroides vulgatus | bacteria | bacteroidetes | 821 | Bacteroides vulgatus | 99.78 | 211 |
| FBI00212 | Clostridium aldenense | bacteria | firmicutes | 358742 | Clostridium aldenense | 99.1 | 212 |
| FBI00213 | Ruminococcus bromii | bacteria | firmicutes | 40518 | Ruminococcus bromii | 98.99 | 213 |
| FBI00214 | Blautia obeum | bacteria | firmicutes | 40520 | Blautia obeum | 98.67 | 214 |
| FBI00215 | Eubacterium rectale | bacteria | firmicutes | 39491 | Eubacterium rectale | 99.78 | 215 |
| FBI00216 | Blautia faecis | bacteria | firmicutes | 871665 | Blautia faecis | 99.76 | 216 |
| FBI00217 | Alistipes shahii | bacteria | bacteroidetes | 328814 | Alistipes shahii | 98.77 | 217 |
| FBI00218 | Bacteroides uniformis | bacteria | bacteroidetes | 820 | Bacteroides uniformis | 99.42 | 218 |
| FBI00219 | Roseburia hominis | bacteria | firmicutes | 301301 | Roseburia hominis | 99.78 | 219 |
| FBI00220 | Megasphaera massiliensis | bacteria | firmicutes | 1232428 | Megasphaera | 98.8 | 220 |
| | | | | | massiliensis | | |
| FBI00221 | Butyricimonas faecihominis | bacteria | bacteroidetes | 1472416 | Butyricimonas | 98.61 | 221 |
| | | | | | faecihominis | | |
| FBI00222 | Alistipes onderdonkii | bacteria | bacteroidetes | 328813 | Alistipes onderdonkii | 99.78 | 222 |
| FBI00223 | Alistipes onderdonkii | bacteria | bacteroidetes | 328813 | Alistipes onderdonkii | 99.7 | 223 |
| FBI00224 | Sutterella wadsworthensis | bacteria | proteobacteria | 40545 | Sutterella | 99.71 | 224 |
| | | | | | wadsworthensis | | |
| FBI00225 | Phascolarctobacterium | bacteria | firmicutes | 33025 | Phascolarctobacterium | 99.37 | 225 |
| | faecium | | | | faecium | | |
| FBI00226 | Catabacter hongkongensis | bacteria | firmicutes | 270498 | Catabacter | 99.71 | 226 |
| | | | | | hongkongensis | | |
| FBI00227 | Bacteroides cellulosilyticus | bacteria | bacteroidetes | 246787 | Bacteroides | 99.2 | 227 |
| | | | | | cellulosilyticus | | |
| FBI00228 | Collinsella aerofaciens | bacteria | actinobacteria | 74426 | Collinsella aerofaciens | 99.27 | 228 |
| FBI00229 | Alistipes senegalensis | bacteria | bacteroidetes | 1288121 | Alistipes senegalensis | 99.19 | 229 |
| FBI00230 | Eisenbergiella tayi | bacteria | firmicutes | 1432052 | Eisenbergiella tayi | 99.48 | 230 |
| FBI00231 | Parabacteroides distasonis | bacteria | bacteroidetes | 823 | Parabacteroides | 99.11 | 231 |
| | | | | | distasonis | | |
| FBI00232 | Bacteroides stercoris | bacteria | bacteroidetes | 46506 | Bacteroides stercoris | 98.84 | 232 |
| FBI00233 | Ruminococcaceae sp. | bacteria | firmicutes | 474960 | Anaerotruncus | 91.63 | 233 |
| | FBI00233 | | | | colihominis | | |
| FBI00234 | Faecalicatena contorta | bacteria | firmicutes | 39482 | Faecalicatena contorta | 99.21 | 234 |
| FBI00235 | Alistipes shahii | bacteria | bacteroidetes | 328814 | Alistipes shahii | 99.86 | 235 |
| FBI00236 | Eisenbergiella tayi | bacteria | firmicutes | 1432052 | Eisenbergiella tayi | 99.41 | 236 |
| FBI00237 | Dielma fastidiosa | bacteria | firmicutes | 1034346 | Dielma fastidiosa | 99.78 | 237 |
| FBI00238 | Alistipes sp. FBI00238 | bacteria | bacteroidetes | 239759 | Alistipes finegoldii | 95.84 | 238 |
| FBI00239 | Lactonifactor longoviformis | bacteria | firmicutes | 341220 | Lactonifactor | 98.99 | 239 |
| | | | | | longoviformis | | |
| FBI00240 | Clostridium citroniae | bacteria | firmicutes | 358743 | Clostridium citroniae | 99.57 | 240 |
| FBI00241 | Collinsella aerofaciens | bacteria | actinobacteria | 74426 | Collinsella aerofaciens | 99.34 | 241 |
| FBI00242 | Clostridium aldenense | bacteria | firmicutes | 358742 | Clostridium aldenense | 99.05 | 242 |
| FBI00243 | Eubacterium siraeum | bacteria | firmicutes | 39492 | Eubacterium siraeum | 98.53 | 243 |
| FBI00244 | Faecalibacterium prausnitzii | bacteria | firmicutes | 853 | Faecalibacterium | 98.69 | 244 |
| | | | | | prausnitzii | | |
| FBI00245 | Acidaminococcus intestini | bacteria | firmicutes | 187327 | Acidaminococcus | 99.72 | 245 |
| | | | | | intestini | | |
| FBI00246 | Bifidobacterium longum | bacteria | actinobacteria | 216816 | Bifidobacterium longum | 99.7 | 246 |
| FBI00247 | Phascolarctobacterium | bacteria | firmicutes | 33025 | Phascolarctobacterium | 99.79 | 247 |
| | faecium | | | | faecium | | |
| FBI00248 | Neglecta timonensis | bacteria | firmicutes | 1776382 | Emergencia timonensis | 99.64 | 248 |
| FBI00249 | Citrobacter portucalensis | bacteria | proteobacteria | 1639133 | Citrobacter freundii | 99.79 | 249 |
| FBI00250 | Bifidobacterium adolescentis | bacteria | actinobacteria | 1680 | Bifidobacterium faecale | 99.24 | 250 |
| FBI00251 | Bifidobacterium | bacteria | actinobacteria | 28026 | Bifidobacterium | 99.85 | 251 |
| | pseudocatenulatum | | | | pseudocatenulatum | | |
| FBI00252 | Oscillibacter sp. FBI00028 | bacteria | firmicutes | 459786 | Oscillibacter | 95.79 | 252 |
| | | | | | ruminantium | | |
| FBI00253 | Roseburia hominis | bacteria | firmicutes | 301301 | Roseburia hominis | 99.71 | 253 |
| FBI00254 | Eubacterium hallii | bacteria | firmicutes | 39488 | Eubacterium hallii | 99.08 | 254 |
| FBI00255 | Hungatella effluvii | bacteria | firmicutes | 1096246 | Hungatella hathewayi | 98.56 | 255 |
| FBI00256 | Blautia faecis | bacteria | firmicutes | 871665 | Blautia faecis | 97.86 | 256 |
| FBI00257 | Eubacterium eligens | bacteria | firmicutes | 39485 | Eubacterium eligens | 99.28 | 257 |
| FBI00258 | Turicibacter sanguinis | bacteria | firmicutes | 154288 | Turicibacter sanguinis | 99.93 | 258 |
| FBI00259 | Dorea longicatena | bacteria | firmicutes | 88431 | Dorea longicatena | 99.7 | 259 |
| FBI00260 | Eubacterium rectale | bacteria | firmicutes | 39491 | Eubacterium rectale | 99.64 | 260 |
| FBI00261 | Bacteroides uniformis | bacteria | bacteroidetes | 820 | Bacteroides uniformis | 99.21 | 261 |
| FBI00262 | Bacteroides massiliensis | bacteria | bacteroidetes | 204516 | Bacteroides massiliensis | 99.71 | 262 |
| FBI00263 | Bacteroides caccae | bacteria | bacteroidetes | 47678 | Bacteroides caccae | 99.56 | 263 |
| FBI00264 | Bifidobacterium adolescentis | bacteria | actinobacteria | 1680 | Bifidobacterium faecale | 99.2 | 264 |
| FBI00265 | Bacteroides cellulosilyticus | bacteria | bacteroidetes | 246787 | Bacteroides | 99.21 | 265 |
| | | | | | cellulosilyticus | | |
| FBI00266 | Coprococcus eutactus | bacteria | firmicutes | 33043 | Coprococcus eutactus | 99.2 | 266 |
| FBI00267 | Anaerofustis stercorihominis | bacteria | firmicutes | 214853 | Anaerofustis | 97.29 | 267 |
| | | | | | stercorihominis | | |
| FBI00268 | Clostridiales sp. FBI00268 | bacteria | firmicutes | 186802 | Catabacter | 86.05 | 268 |
| | | | | | hongkongensis | | |
| FBI00269 | Alistipes putredinis | bacteria | bacteroidetes | 28117 | Alistipes putredinis | 100 | 269 |
| FBI00270 | Methanobrevibacter smithii | archaea | euryarchaeota | 2173 | Methanobrevibacter | 99.69 | 270 |
| | | | | | smithii | | |
| FBI00271 | Bacteroides xylanisolvens | bacteria | bacteroidetes | 371601 | Bacteroides | 98.42 | 271 |
| | | | | | xylanisolvens | | |
| FBI00272 | Clostridiales XIII sp. | bacteria | firmicutes | 543314 | Anaerovorax | 93.12 | 272 |
| | FBI00272 | | | | odorimutans | | |
| FBI00273 | Barnesiella intestinihominis | bacteria | bacteroidetes | 487174 | Barnesiella | 99.43 | 273 |
| | | | | | intestinihominis | | |
| FBI00274 | Eubacterium xylanophilum | bacteria | firmicutes | 39497 | Eubacterium | 93.5 | 274 |
| | | | | | xylanophilum | | |
| FBI00275 | Holdemanella biformis | bacteria | firmicutes | 1735 | Holdemanella biformis | 98.99 | 275 |
| FBI00276 | Dorea formicigenerans | bacteria | firmicutes | 39486 | Dorea formicigenerans | 98.19 | 276 |
| FBI00277 | Alistipes onderdonkii | bacteria | bacteroidetes | 328813 | Alistipes onderdonkii | 99.63 | 277 |
| FBI00278 | Eubacterium ventriosum | bacteria | firmicutes | 39496 | Eubacterium ventriosum | 94.14 | 278 |
| FBI00279 | Coprococcus comes | bacteria | firmicutes | 410072 | Coprococcus comes | 98.48 | 279 |
| FBI00280 | Bacteroides thetaiotaomicron | bacteria | bacteroidetes | 818 | Bacteroides | 100 | 280 |
| | | | | | thetaiotaomicron | | |
| FBI00281 | Senegalimassilia anaerobia | bacteria | actinobacteria | 1473216 | Senegalimassilia | 99.45 | 281 |
| | | | | | anaerobia | | |
| FBI00282 | Porphyromonas | bacteria | bacteroidetes | 28123 | Porphyromonas | 99.35 | 282 |
| | asaccharolytica | | | | asaccharolytica | | |
| FBI00283 | Ruminococcus bromii | bacteria | firmicutes | 40518 | Ruminococcus bromii | 96.02 | 283 |
| FBI00284 | Blautia obeum | bacteria | firmicutes | 40520 | Blautia obeum | 98.67 | 284 |
| FBI00285 | Lachnospira sp. FBI00063 | bacteria | firmicutes | 28050 | Lactobacillus rogosae | 95.3 | 285 |
| | FBI00285 FBI00364 | | | | | | |
| FBI00286 | Fusicatenibacter | bacteria | firmicutes | 1150298 | Fusicatenibacter | 96.32 | 286 |
| | saccharivorans | | | | saccharivorans | | |
| FBI00287 | Alistipes shahii | bacteria | bacteroidetes | 328814 | Alistipes shahii | 98.47 | 287 |
| FBI00288 | Blautia hydrogenotrophica | bacteria | firmicutes | 53443 | Blautia | 99.57 | 288 |
| | | | | | hydrogenotrophica | | |
| FBI00289 | Oxalobacter formigenes | bacteria | proteobacteria | 847 | Oxalobacter formigenes | 99.21 | 289 |
| FBI00290 | Lachnospiraceae sp. | bacteria | firmicutes | 186803 | Eubacterium | 94.81 | 290 |
| | FBI00290 | | | | ruminantium | | |
| FBI00291 | Oribacterium sp. FBI00291 | bacteria | firmicutes | 265975 | Lactobacillus rogosae | 91.63 | 291 |
| FBI00292 | Methanobrevibacter smithii | archaea | euryarchaeota | 2173 | Methanobrevibacter | 99.44 | 292 |
| | | | | | smithii | | |
| FBI00293 | Bifidobacterium adolescentis | bacteria | actinobacteria | 1680 | Bifidobacterium | 98.77 | 293 |
| | | | | | adolescentis | | |
| FBI00294 | Bacteroides stercoris | bacteria | bacteroidetes | 46506 | Bacteroides stercoris | 99.35 | 294 |
| FBI00295 | Bifidobacterium adolescentis | bacteria | actinobacteria | 1680 | Bifidobacterium | 98.48 | 295 |
| | | | | | adolescentis | | |
| FBI00296 | Dorea longicatena | bacteria | firmicutes | 88431 | Dorea longicatena | 99.21 | 296 |
| FBI00297 | Alistipes obesi | bacteria | bacteroidetes | 2585118 | Alistipes obesi | 99.49 | 297 |
| FBI00298 | Faecalibacterium prausnitzii | bacteria | firmicutes | 853 | Faecalibacterium | 97.24 | 298 |
| | | | | | prausnitzii | | |
| FBI00299 | Streptococcus pasteurianus | bacteria | firmicutes | 197614 | Streptococcus | 100 | 299 |
| | | | | | pasteurianus | | |
| FBI00300 | Collinsella aerofaciens | bacteria | actinobacteria | 74426 | Collinsella aerofaciens | 99.49 | 300 |
| FBI00301 | Bifidobacterium adolescentis | bacteria | actinobacteria | 1680 | Bifidobacterium | 98.64 | 301 |
| | | | | | adolescentis | | |
| FBI00302 | Blautia faecis | bacteria | firmicutes | 871665 | Blautia faecis | 99.6 | 302 |
| FBI00303 | Parabacteroides merdae | bacteria | bacteroidetes | 46503 | Parabacteroides merdae | 98.78 | 303 |
| FBI00304 | Dorea longicatena | bacteria | firmicutes | 88431 | Dorea longicatena | 99.7 | 304 |
| FBI00305 | Alistipes onderdonkii | bacteria | bacteroidetes | 328813 | Alistipes onderdonkii | 99.85 | 305 |
| FBI00306 | Parasutterella | bacteria | proteobacteria | 487175 | Parasutterella | 98.53 | 306 |
| | excrementihominis | | | | excrementihominis | | |
| FBI00307 | Parasutterella | bacteria | proteobacteria | 487175 | Parasutterella | 98.53 | 307 |
| | excrementihominis | | | | excrementihominis | | |
| FBI00308 | Bacteroides vulgatus | bacteria | bacteroidetes | 821 | Bacteroides vulgatus | 99.64 | 308 |
| FBI00309 | Eubacterium rectale | bacteria | firmicutes | 39491 | Eubacterium rectale | 99.71 | 309 |
| FBI00310 | Butyricimonas faecihominis | bacteria | bacteroidetes | 1472416 | Butyricimonas | 99.13 | 310 |
| | | | | | faecihominis | | |
| FBI00311 | Anaerostipes hadrus | bacteria | firmicutes | 649756 | Anaerostipes hadrus | 99.07 | 311 |
| FBI00312 | Alistipes shahii | bacteria | bacteroidetes | 328814 | Alistipes shahii | 99.35 | 312 |
| FBI00313 | Collinsella aerofaciens | bacteria | actinobacteria | 74426 | Collinsella aerofaciens | 99.56 | 313 |
| FBI00314 | Anaerotignum | bacteria | firmicutes | 160404 | Anaerotignum | 99.57 | 314 |
| | lactatifermentans | | | | lactatifermentans | | |
| FBI00315 | Blautia obeum | bacteria | firmicutes | 40520 | Blautia obeum | 98.82 | 315 |
| FBI00316 | Collinsella aerofaciens | bacteria | actinobacteria | 74426 | Collinsella aerofaciens | 99.26 | 316 |
| FBI00317 | Bifidobacterium longum | bacteria | actinobacteria | 216816 | Bifidobacterium longum | 99.49 | 317 |
| FBI00318 | Collinsella aerofaciens | bacteria | actinobacteria | 74426 | Collinsella aerofaciens | 99.41 | 318 |
| FBI00319 | Collinsella aerofaciens | bacteria | actinobacteria | 74426 | Collinsella aerofaciens | 99.56 | 319 |
| FBI00320 | Dorea formicigenerans | bacteria | firmicutes | 39486 | Dorea formicigenerans | 98.13 | 320 |
| FBI00321 | Bacteroides vulgatus | bacteria | bacteroidetes | 821 | Bacteroides vulgatus | 97.63 | 321 |
| FBI00322 | Bifidobacterium adolescentis | bacteria | actinobacteria | 1680 | Bifidobacterium | 98.7 | 322 |
| | | | | | adolescentis | | |
| FBI00323 | Blautia wexlerae | bacteria | firmicutes | 418240 | Blautia wexlerae | 99.28 | 323 |
| FBI00324 | Bilophila wadsworthia | bacteria | proteobacteria | 35833 | Desulfovibrio | 91.52 | 324 |
| | | | | | desulfuricans | | |
| FBI00325 | Alistipes indistinctus | bacteria | bacteroidetes | 626932 | Alistipes indistinctus | 99.93 | 325 |
| FBI00326 | Bacteroides vulgatus | bacteria | bacteroidetes | 821 | Bacteroides vulgatus | 98.63 | 326 |
| FBI00327 | Coprococcus comes | bacteria | firmicutes | 410072 | Coprococcus comes | 99.34 | 327 |
| FBI00328 | Blautia luti | bacteria | firmicutes | 89014 | Blautia luti | 97.78 | 328 |
| FBI00329 | Alistipes indistinctus | bacteria | bacteroidetes | 626932 | Alistipes indistinctus | 99.93 | 329 |
| FBI00330 | Bifidobacterium longum | bacteria | actinobacteria | 216816 | Bifidobacterium longum | 99.28 | 330 |
| FBI00331 | Bacillus circulans | bacteria | firmicutes | 1397 | Bacillus circulans | 96.84 | 331 |
| FBI00332 | Clostridium intestinale | bacteria | firmicutes | 36845 | Clostridium intestinale | 99.13 | 332 |
| FBI00333 | Alistipes onderdonkii | bacteria | bacteroidetes | 328813 | Alistipes onderdonkii | 99.93 | 333 |
| FBI00334 | Bacteroides caccae | bacteria | bacteroidetes | 47678 | Bacteroides caccae | 99.56 | 334 |
| FBI00335 | Anaerostipes hadrus | bacteria | firmicutes | 649756 | Anaerostipes hadrus | 99.64 | 335 |
| FBI00336 | Staphylococcus epidermidis | bacteria | firmicutes | 1282 | Staphylococcus | 99.93 | 336 |
| | | | | | epidermidis | | |
| FBI00337 | Coprococcus comes | bacteria | firmicutes | 410072 | Coprococcus comes | 99.21 | 337 |
| FBI00338 | Blautia obeum | bacteria | firmicutes | 40520 | Blautia obeum | 97.75 | 338 |
| FBI00339 | Eubacterium rectale | bacteria | firmicutes | 39491 | Eubacterium rectale | 99.86 | 339 |
| FBI00340 | Lachnospiraceae sp. | bacteria | firmicutes | 186803 | Clostridium | 93.57 | 340 |
| | FBI00033 | | | | amygdalinum | | |
| FBI00341 | Lachnospiraceae sp. | bacteria | firmicutes | 186803 | Roseburia faecis | 95.06 | 341 |
| | FBI00071 | | | | | | |
| FBI00342 | Alistipes indistinctus | bacteria | bacteroidetes | 626932 | Alistipes indistinctus | 100 | 342 |
| FBI00343 | Sutterella massiliensis | bacteria | proteobacteria | 1816689 | Sutterella massiliensis | 99.86 | 343 |
| FBI00344 | Alistipes putredinis | bacteria | bacteroidetes | 28117 | Alistipes putredinis | 99.93 | 344 |
| FBI00345 | Roseburia inulinivorans | bacteria | firmicutes | 360807 | Roseburia inulinivorans | 97.35 | 345 |
| FBI00346 | Coriobacteriia sp. FBI00346 | bacteria | actinobacteria | 84998 | Paraeggerthella | 93.84 | 346 |
| | | | | | hongkongensis | | |
| FBI00347 | Bacteroides uniformis | bacteria | bacteroidetes | 820 | Bacteroides uniformis | 99.85 | 347 |
| FBI00348 | Parabacteroides merdae | bacteria | bacteroidetes | 46503 | Parabacteroides merdae | 99.93 | 348 |
| FBI00349 | Holdemanella biformis | bacteria | firmicutes | 1735 | Holdemanella biformis | 98.14 | 349 |
| FBI00350 | Alistipes putredinis | bacteria | bacteroidetes | 28117 | Alistipes putredinis | 100 | 350 |
| FBI00351 | Alistipes obesi | bacteria | bacteroidetes | 2585118 | Alistipes obesi | 99.78 | 351 |
| FBI00352 | Collinsella aerofaciens | bacteria | actinobacteria | 74426 | Collinsella aerofaciens | 99.56 | 352 |
| FBI00353 | Bifidobacterium adolescentis | bacteria | actinobacteria | 1680 | Bifidobacterium | 98.85 | 353 |
| | | | | | adolescentis | | |
| FBI00354 | Bifidobacterium adolescentis | bacteria | actinobacteria | 1680 | Bifidobacterium | 98.7 | 354 |
| | | | | | stercoris | | |
| FBI00355 | Blautia massiliensis | bacteria | firmicutes | 1737424 | Blautia luti | 98.09 | 355 |
| FBI00356 | Eubacterium eligens | bacteria | firmicutes | 39485 | Eubacterium eligens | 98.5 | 356 |
| FBI00357 | Bacteroides kribbi/ | bacteria | bacteroidetes | 816 | Bacteroides koreensis | 99.71 | 357 |
| | Bacteroides koreensis species | | | | | | |
| | cluster | | | | | | |
| FBI00358 | Eubacterium hallii | bacteria | firmicutes | 39488 | Eubacterium hallii | 98.26 | 358 |
| FBI00359 | Eubacterium rectale | bacteria | firmicutes | 39491 | Eubacterium rectale | 99.79 | 359 |
| FBI00360 | Bacteroides massiliensis | bacteria | bacteroidetes | 204516 | Bacteroides massiliensis | 99.93 | 360 |
| FBI00361 | Bacteroides stercoris | bacteria | bacteroidetes | 46506 | Bacteroides stercoris | 99.36 | 361 |
| FBI00362 | Prevotella copri | bacteria | bacteroidetes | 165179 | Prevotella copri | 98.5 | 362 |
| FBI00363 | Roseburia intestinalis | bacteria | firmicutes | 166486 | Roseburia intestinalis | 99.78 | 363 |
| FBI00364 | Lachnospira sp. FBI00063 | bacteria | firmicutes | 28050 | Lactobacillus rogosae | 95.2 | 364 |
| | FBI00285 FBI00364 | | | | | | |
| FBI00365 | Paraprevotella clara | bacteria | bacteroidetes | 454154 | Paraprevotella clara | 98.78 | 365 |
| FBI00366 | Eubacterium eligens | bacteria | firmicutes | 39485 | Eubacterium eligens | 99 | 366 |
| FBI00367 | Phascolarctobacterium | bacteria | firmicutes | 33025 | Phascolarctobacterium | 99.58 | 367 |
| | faecium | | | | faecium | | |
| FBI00368 | Alistipes putredinis | bacteria | bacteroidetes | 28117 | Alistipes putredinis | 99.86 | 368 |
| FBI00369 | Clostridiales sp. FBI00369 | bacteria | firmicutes | 186802 | Catabacter | 86 | 369 |
| | | | | | hongkongensis | | |
| FBI00370 | Bifidobacterium adolescentis | bacteria | actinobacteria | 1680 | Bifidobacterium | 97.11 | 370 |
| | | | | | adolescentis | | |
| FBI00371 | Bacteroides stercoris | bacteria | bacteroidetes | 46506 | Bacteroides stercoris | 99.21 | 371 |
| FBI00372 | Dorea longicatena | bacteria | firmicutes | 88431 | Dorea longicatena | 99.7 | 372 |
| FBI00373 | Coriobacteriaceae sp. | bacteria | actinobacteria | 84107 | Parolsenella catena | 96.58 | 373 |
| | FBI00373 FBI00374 | | | | | | |
| FBI00374 | Coriobacteriaceae sp. | bacteria | actinobacteria | 84107 | Parolsenella catena | 97.11 | 374 |
| | FBI00373 FBI00374 | | | | | | |
| FBI00375 | Dorea longicatena | bacteria | firmicutes | 88431 | Dorea longicatena | 99.62 | 375 |
| FBI00376 | Dialister succinatiphilus | bacteria | firmicutes | 487173 | Dialister succinatiphilus | 95.82 | 376 |
| FBI00377 | Clostridiales sp. FBI00377 | bacteria | firmicutes | 186802 | Christensenella | 88.69 | 377 |
| | | | | | massiliensis | | |

TABLE 5
Commercial Oxalate-metabolizing strains

Bifidobacterium dentium ATCC 27678
Bifidobacterium dentium ATCC 27680
Bifidobacterium dentium DSM 20221
Bifidobacterium dentium DSM 20436
Bifidobacterium sp. HM-868
Dialister invisus DSM 15470
Eggerthella lenta ATCC 43055
Eggerthella lenta DSM 2243
Enterococcus faecalis HM-202
Enterococcus faecalis HM-432
Lactobacillus acidophilus ATCC 4357
Lactobacillus acidophilus DSM 20079
Lactobacillus acidophilus DSM 20242
Lactobacillus gasseri ATCC 33323
Lactobacillus gasseri DSMZ 107525
Lactobacillus gasseri DSMZ 20077
Lactobacillus gasseri HM-104
Lactobacillus gasseri HM-644
Lactobacillus helveticus DSM 20075
Lactobacillus reuteri HM-102
Lactobacillus rhamnosus ATCC 53103
Lactobacillus rhamnosus DSM 20245
Lactobacillus rhamnosus DSM 8746
Lactobacillus rhamnosus HM-106
Oxalobacter formigenes ATCC 35274
Oxalobacter formigenes DSM 4420
Oxalobacter formigenes HM-1

TABLE 6
Commercial Supportive strains

Absiella dolichum DSM 3991
Acidaminococcus fermentans DSM 20731
Acidaminococcus sp. HM-81
Adlercreutzia equolifaciens DSM 19450
Akkermansia muciniphila ATCC BAA-835
Alistipes finegoldii DSM 17242
Alistipes indistinctus DSM 22520
Alistipes onderdonkii DSM 19147
Alistipes putredinis DSM 17216
Alistipes senegalensis DSM 25460
Alistipes shahii DSM 19121
Anaerobutyricum hallii DSM 3353
Anaerococcus lactolyticus DSM 7456
Anaerofustis stercorihominis DSM 17244
Anaerostipes caccae DSM 14662
Anaerotruncus colihominis DSM 17241
Bacteroides caccae ATCC 43185
Bacteroides caccae HM-728
Bacteroides cellulosilyticus DSM 14838
Bacteroides cellulosilyticus HM-726
Bacteroides coprocola DSM 17136
Bacteroides coprophilus DSM 18228
Bacteroides dorei DSM 17855
Bacteroides dorei HM-29
Bacteroides dorei HM-718
Bacteroides eggerthii DSM 20697
Bacteroides eggerthii HM-210
Bacteroides finegoldii DSM 17565
Bacteroides finegoldii HM-727
Bacteroides fragilis HM-20
Bacteroides fragilis HM-709
Bacteroides fragilis HM-710
Bacteroides intestinalis DSM 17393
Bacteroides ovatus ATCC 8483
Bacteroides ovatus HM-222
Bacteroides pectinophilus ATCC 43243
Bacteroides plebeius DSM 17135
Bacteroides rodentium DSM 26882
Bacteroides salyersiae HM-725
Bacteroides sp. HM-18
Bacteroides sp. HM-19
Bacteroides sp. HM-23
Bacteroides sp. HM-27
Bacteroides sp. HM-28
Bacteroides sp. HM-58
Bacteroides stercoris DSM 19555
Bacteroides stercoris HM-1036
Bacteroides thetaiotaomicron ATCC 29148
Bacteroides uniformis ATCC 8492
Bacteroides vulgatus ATCC 8482
Bacteroides vulgatus HM-720
Bacteroides xylanisolvens DSM 18836
Bifidobacterium adolescentis HM-633
Bifidobacterium angulatum HM-1189
Bifidobacterium animalis DSM 20104
Bifidobacterium animalis subsp. Lactis DSMZ 10140
Bifidobacterium bifidum ATCC 11863
Bifidobacterium breve DSM 20213
Bifidobacterium catenulatum DSM 16992
Bifidobacterium longum infantis ATCC 55813
Bifidobacterium longum subsp. longum HM-845
Bifidobacterium longum subsp. longum HM-846
Bifidobacterium longum subsp. longum HM-847
Bifidobacterium longum subsp. longum HM-848
Bifidobacterium pseudocatenulatum DSM 20438
Bilophila wadsworthia ATCC 49260
Bilophila wadsworthia DSM 11045
Blautia hansenii DSM 20583
Blautia hydrogenotrophica DSM 10507
Blautia obeum DSMZ 25238
Blautia sp. HM-1032
Blautia wexlerae DSM 19850
Butyricimonas virosa DSM 23226
Butyrivibrio crossotus DSM 2876
Catenibacterium mitsuokai DSM 15897
Cetobacterium somerae DSM 23941
Clostridium asparagiforme DSM 15981
Clostridium bolteae DSM 15670
Clostridium bolteae HM-1038
Clostridium bolteae HM-318
Clostridium cadaveris HM-1040
Clostridium citroniae HM-315
Clostridium hiranonis DSM 13275
Clostridium hylemonae DSM 15053
Clostridium innocuum HM-173
Clostridium leptum DSM 753
Clostridium methylpentosum DSM 5476
Clostridium saccharolyticum DSM 2544
Clostridium scindens DSM 5676
Clostridium scindens VPI 12708
Clostridium sp. ATCC 29733
Clostridium sp. DSM 4029
Clostridium sp. HM-634
Clostridium sp. HM-635
Clostridium spiroforme DSM 1552
Clostridium sporogenes ATCC 15579
Clostridium sporogenes ATCC 17889
Clostridium sporogenes DSM 767
Clostridium symbiosum HM-309
Clostridium symbiosum HM-319
Collinsella aerofaciens ATCC 25986
Collinsella stercoris DSM 13279
Coprococcus catus ATCC 27761
Coprococcus comes ATCC 27758
Coprococcus eutactus ATCC 27759
Coprococcus eutactus ATCC 51897
Coprococcus sp. DSM 21649
Desulfovibrio piger ATCC 29098
Dialister pneumosintes ATCC 51894
Dorea formicigenerans ATCC 27755
Dorea longicatena DSM 13814
Eggerthella sp. DSM 11767
Eggerthella sp. DSM 11863
Eggerthella sp. HM-1099
Ethanoligenens harbinense DSM 18485
Eubacterium eligens ATCC 27750
Eubacterium rectale ATCC 33656
Eubacterium siraeum DSM 15702
Eubacterium ventriosum ATCC 27560
Faecalibacterium prausnitzii ATCC 27766
Faecalibacterium prausnitzii ATCC 27768
Faecalibacterium prausnitzii DSM 17677
Faecalibacterium prausnitzii HM-473
Flavonifractor plautii HM-1044
Flavonifractor plautii HM-303
Granulicatella adiacens ATCC 49175
Holdemanella biformis DSM 3989
Holdemania filiformis DSM 12042
Hungatella (prev. Clostridium) hathewayi HM-308
Hungatella hathewayi DSM 13479
Intestinibacter bartlettii DSM 16795
Intestinimonas butyriciproducens DSM 26588
Lactobacillus amylovorus DSM 20552
Lactobacillus casei subsp. casei ATCC 393
Lactobacillus casei subsp. casei ATCC 39539
Lactobacillus crispatus HM-370
Lactobacillus johnsonii HM-643
Lactobacillus parafarraginis HM-478
Lactobacillus plantarum ATCC 14917
Lactobacillus plantarum ATCC 202195
Lactobacillus ruminis ATCC 25644
Lactobacillus ruminis DSM 20404
Lactobacillus ultunensis DSM 16048
Lactococcus lactis Berridge DSM 20729
Marvinbryantia formatexigens DSM 14469
Megasphaera indica DSM 25562
Megasphaera sp. DSM 102144
Methanobrevibacter smithii DSM 11975
Methanobrevibacter smithii DSM 2374
Methanobrevibacter smithii DSM 2375
Methanobrevibacter smithii DSM 861
Methanomassiliicoccus luminyensis DSM 25720
Methanosphaera stadtmanae DSMZ 3091
Mitsuokella multacida DSM 20544
Odoribacter splanchnicus DSM 20712
Olsenella uli DSM 7084
Oscillibacter sp. HM-1030
Parabacteroides distasonis ATCC 8503
Parabacteroides goldsteinii HM-1050
Parabacteroides johnsonii DSM 18315
Parabacteroides johnsonii HM-731
Parabacteroides merdae DSM 19495
Parabacteroides merdae HM-729
Parabacteroides merdae HM-730
Parabacteroides sp. HM-77
Peptostreptococcus anaerobius DSM 2949
Prevotella buccae HM-45
Prevotella buccalis DSM 20616
Prevotella copri DSM 18205
Proteocatella sphenisci DSM 23131
Providencia rettgeri ATCC BAA-2525
Roseburia intestinalis DSM 14610
Roseburia inulinivorans DSM 16841
Ruminococcaceae sp. HM-79
Ruminococcus albus ATCC 27210
Ruminococcus bromii ATCC 27255
Ruminococcus bromii ATCC 51896
Ruminococcus gauvreauii DSM 19829
Ruminococcus gnavus ATCC 29149
Ruminococcus gnavus DSM 108212
Ruminococcus gnavus HM-1056
Ruminococcus lactaris ATCC 29176
Ruminococcus lactaris HM-1057
Ruminococcus torques ATCC 27756
Slackia exigua DSM 15923
Slackia heliotrinireducens DSM 20476
Solobacterium moorei DSM 22971
Streptococcus salivarius subsp. thermophilus ATCC BAA-491
Streptococcus thermophilus ATCC 14485
Subdoligranulum variabile DSM 15176
Turicibacter sanguinis DSM 14220
Tyzzerella nexilis DSM 1787
Veillonella dispar ATCC 17748
Veillonella sp. HM-49
Veillonella sp. HM-64

### Example 2: Commercial Microbial Strain Sensitivities to Oxalate Concentration

[0287] To determine the effect of the presence of oxalate on growth of commercial microbial strains, cultures were grown in their respective banking media (e.g., Mega Media, or Chopped Meat Media) to saturation and back-diluted into the same respective banking media containing no oxalate, 0.5% oxalate, or 0.125% oxalate. FIG. 1 shows % growth inhibition of microbial strains in the presence of 0.5% oxalate (closed bars) or 0.125% oxalate (open bars). % growth inhibition was calculated by determining the ratio of background-subtracted optical density (O.D.) of a microbial strain in the presence of oxalate to the O.D. of the same microbial strain grown in the absence of oxalate.

### Example 3: In Vitro Oxalate Metabolization by Commercial Microbial Strains

[0288] 48-well deep well plates were filled with 2.5 mL of banking media per commercial microbial strain, per condition. Potassium oxalate was added to achieve final oxalate concentrations of 7.5 mM or 750 μM. 50 μl of each microbial strain in banking media was added to the appropriate well and mixed by trituration. 1 mL of each sample was transferred to an appropriate well of a 96-well collection plate containing 25 μl of 6N HCl and mixed by trituration. The collection plate was covered and incubated at 37° C. for 0, 24, or 72 hours under anaerobic conditions.

[0289] The oxalate metabolizing activity of the microbial strains was measured using a commercial colorimetric enzyme kit (Sigma Aldrich Oxalate Assay kit, Catalog No. MAK315) in accordance with the manufacturer's instructions.

[0290] In brief, acidified microbial suspensions were centrifuged for 1 minute at >10,000×g to pellet intact cells and cellular debris. 10 μl of sample supernatant was transferred into each of three separate wells of a multiwell plate designated as a “Sample Blank,” “Sample,” or “Internal Standard.” 10 μl of dH₂O was added to Sample Blank and Sample wells, and 10 μl of oxalate standard was added to the Internal Standard well. Blank reagent was prepared for all Sample Blank wells by mixing 155 μl of Reagent B and 1 μl of Horseradish peroxidase (“HRP”) enzyme per Sample Blank well. 157 μl of Working Reagent (155 μl of Reagent B, 1 μl of oxalate oxidase enzyme, and 1 μl of HRP) was prepared for each Sample and Internal Standard well. 150 μl of Blank Reagent was added to each Sample Blank well and 150 μl of Working Reagent was added to each Sample and Internal Standard Well. Solutions were mixed and incubated for 10 minutes at room temperature. Following incubation, optical density was measured for each sample well at 595 nm using a BioTek Epoch 2 plate reader. Sample and Internal Standard values were corrected by subtracting the measured OD₅₉₅ of the Sample Blank well from the measured OD₅₉₅ of the Sample and Internal Standard wells. The proportion of oxalate remaining in each sample after 24 or 72 hour incubation was determined by dividing the corrected OD₅₉₅ value from the Sample well for the initial timepoint (i.e., t=0 hours).

[0291] FIG. 2 shows % oxalate remaining in microbial strain cultures in Mega Media (FIG. 2A) or Chopped Meat Media (FIG. 2B) seeded with 7.5 mM oxalate (closed bars) or 750 μM oxalate (open bars) after 72 hours incubation at 37° C. under anaerobic conditions.

### In Vitro Oxalate Metabolizing Activities of Microbial Strains Cultured Under Different pH

[0292] To determine the effect of pH on oxalate metabolization, the in vitro oxalate metabolization assay as described above was performed at an oxalate concentration of 7.5 mM, in culture media at pH 7.2 or adjusted to pH 4.5 with NaOH.

[0293] FIG. 3 shows % oxalate remaining in microbial strain cultures in Mega Media (FIG. 3A) or Chopped Meat Media (FIG. 3B) seeded with 7.5 mM oxalate at pH 4.5 (closed bars) or pH 7.2 (open bars) after 72 hours incubation at 37° C. under anaerobic conditions.

### In Vitro Oxalate-Metabolizing Activity of Microbial Consortia

[0294] To determine the oxalate-metabolizing activity of a microbial consortium, the in vitro oxalate metabolization assay was performed at an oxalate concentration of 7.5 mM.

[0295] FIG. 4 shows the Absorbance (595 nm) of cultures comprising O. formigenes only, active microbial strains only, supportive microbial strains only, or a complete microbial consortium (i.e. both active and supportive microbial strains) in Mega Media (FIG. 4A) or Chopped Meat Media (FIG. 4B) at the time of oxalate addition (t=0, closed bars) or after 72 hours (open bars).

### Example 4: Oxalate Analysis by Liquid Chromatography Tandem Mass Spectrometry (LC-MS/MS)

[0296] In order to quantify oxalate levels in incubation medium, an aliquot of medium was transferred to a polypropylene tube containing 60 μL of 6N HCl/ml medium, vortex mixed, snap frozen, and then stored at −70° C. On the day of analysis, samples were thawed and vortexed to mix, and then 50 μL of media or media diluted with 0.1% formic acid were transferred with mixing to a polypropylene tube containing 20 μL of internal standard (1 mM ¹³C₂-oxalate in 0.1% formic acid) and vortex mixed. A 500 μL aliquot of 2% formic acid was added and vortex mixed. The entire sample was passed through a conditioned Strata-X-AW solid phase extraction plate (Phenomenex, 10 mg, 8E-S038-AGB), washed, and then eluted with 5% ammonium hydroxide in methanol. The eluent was then dried under nitrogen gas, re-constituted in 0.1% formic acid, and then placed on an API6500 autosampler and 5 μL were injected into a 2.1×50 mm Waters XBridge HILIC 3.5 μm particle size column. LC-MS/MS parameters were as indicated in Table 7.

[0297] In order to quantify oxalate levels in urine, urine samples were collected and immediately snap frozen and stored at −70° C. On the day of analysis, samples were thawed and vortexed, and then 50 μL of urine or urine diluted with 0.1% formic acid was transferred with mixing to a polypropylene tube containing 20 μL of internal standard (1 mM ¹³C₂-oxalate+5 mM ²H₃-creatinine in 0.1% formic acid) and vortex mixed. A 500 μL aliquot of 2% formic acid was added and vortex mixed. The entire sample was passed through a conditioned Strata-X-AW solid phase extraction plate (Phenomenex, 10 mg, 8E-5038-AGB), washed, and then eluted with 5% ammonium hydroxide in methanol. The eluent was then dried under nitrogen gas, re-constituted in 0.1% formic acid, and then placed on an API6500 autosampler and 5 μL were injected into a 2.1×50 mm Waters XBridge HILIC 3.5 μm particle size column. LC-MS/MS parameters were as indicated in Table 7.

TABLE 7

| Time (min) | % Eluent B |
|---|---|
| Initial | 89.5 |
| 1 | 89.5 |
| 2.5 | 0 |
| 4.20 | 0 |
| 4.21 | 89.5 |
| 6.69 | 89.5 |
| 6.70 | End |

Eluent A: 95:5 20 mM Ammonium Acetate pH 8:Acetonitrile
Eluent B: Acetonitrile
Autosampler Wash: 50% methanol
Flow rate: 500 μL/min
Column temperature: 50° C.
Divert output to waste from initial to 1.5 min and after 4.5 min

### Example 5: In Vivo Oxalate Metabolization in Balb/c Male Mice Treated with a Microbial Consortium Containing Commercial Strains of Microbes

[0298] This example describes a study testing the ability of a microbial consortium, containing commercial strains of microbes, to degrade oxalate in vivo in Balb/c male mice.

[0299] To determine the in vivo oxalate degrading activity of a microbial consortium described herein, 30 gnotobiotic (n=3 per condition) Balb/c male mice were weighed on Day 0 and colonized by oral gavage with either a plurality of active microbes alone, a supportive community alone, O. formigenes alone, or a complete microbial consortium (active and supportives). The plurality of active microbes and the supportive community of microbes contained the strains in Table 8 marked with an ‘X’ in the indicated column. Colonized mice were fed either a defined, low-complexity diet supplemented with excess oxalate in order to induce hyperoxaluria (see Table 2 above) or a nutritionally equivalent control diet lacking oxalate (see Table 1 above).

[0300] After a two-week period, mice were sacrificed and a variety of samples were collected including terminal urine, feces, serum, kidneys, liver, gall bladder, cecum and spleen.

TABLE 8

| | Catalog | Active or | Examples 5 and 8 | | Examples 6, 7, 12, 13, 14 | |
|---|---|---|---|---|---|---|
| Species | Number | Supportive | Active | Supportive | Active | Supportive |
| Acidaminococcus fermentans | DSM 20731 | Supportive | | | | X |
| Acidaminococcus intestini | HM-81 | Supportive | | X | | X |
| Adlercreutzia equolifaciens | DSM 19450 | Supportive | | X | | X |
| Akkermansia muciniphila | ATCC BAA-835 | Supportive | | X | | X |
| Alistipes finegoldii | DSM 17242 | Supportive | | X | | X |
| Alistipes indistinctus | DSM 22520 | Supportive | | X | | X |
| Alistipes onderdonkii | DSM 19147 | Supportive | | X | | X |
| Alistipes putredinis | DSM 17216 | Supportive | | | | X |
| Alistipes senegalensis | DSM 25460 | Supportive | | X | | X |
| Alistipes shahii | DSM 19121 | Supportive | | X | | X |
| Anaerobutyricum hallii | DSM 3353 | Supportive | | | | X |
| Anaerococcus lactolyticus | DSM 7456 | Supportive | | | | |
| Anaerofustis stercorihominis | DSM 17244 | Supportive | | | | X |
| Anaerostipes caccae | DSM 14662 | Supportive | | X | | X |
| Anaerotruncus colihominis | DSM 17241 | Supportive | | X | | X |
| Bacteroides caccae | ATCC 43185 | Supportive | | X | | X |
| Bacteroides caccae | HM-728 | Supportive | | | | |
| Bacteroides cellulosilyticus | DSM 14838 | Supportive | | X | | X |
| Bacteroides cellulosilyticus | HM-726 | Supportive | | | | |
| Bacteroides coprocola | DSM 17136 | Supportive | | X | | X |
| Bacteroides coprophilus | DSM 18228 | Supportive | | X | | X |
| Bacteroides dorei | DSM 17855 | Supportive | | X | | X |
| Bacteroides dorei | HM-27 | Supportive | | X | | X |
| Bacteroides dorei | HM-29 | Supportive | | X | | X |
| Bacteroides dorei | HM-718 | Supportive | | | | |
| Bacteroides eggerthii | DSM 20697 | Supportive | | X | | X |
| Bacteroides eggerthii | HM-210 | Supportive | | | | |
| Bacteroides finegoldii | DSM 17565 | Supportive | | X | | X |
| Bacteroides finegoldii | HM-727 | Supportive | | | | |
| Bacteroides fragilis | HM-20 | Supportive | | X | | X |
| Bacteroides fragilis | HM-58 | Supportive | | X | | X |
| Bacteroides fragilis | HM-709 | Supportive | | | | |
| Bacteroides fragilis | HM-710 | Supportive | | | | |
| Bacteroides intestinalis | DSM 17393 | Supportive | | X | | X |
| Bacteroides ovatus | ATCC 8483 | Supportive | | X | | X |
| Bacteroides ovatus | HM-222 | Supportive | | | | |
| Bacteroides pectinophilus | ATCC 43243 | Supportive | | | | X |
| Bacteroides plebeius | DSM 17135 | Supportive | | | | X |
| Bacteroides rodentium | DSM 26882 | Supportive | | X | | X |
| Bacteroides salyersiae | HM-725 | Supportive | | | | |
| Bacteroides sp. | HM-28 | Supportive | | X | | X |
| Bacteroides stercoris | DSM 19555 | Supportive | | X | | X |
| Bacteroides stercoris | HM-1036 | Supportive | | | | |
| Bacteroides thetaiotaomicron | ATCC 29148 | Supportive | | X | | X |
| Bacteroides thetaiotaomicron | HM-23 | Supportive | | | | X |
| Bacteroides uniformis | ATCC 8492 | Supportive | | X | | X |
| Bacteroides vulgatus | ATCC 8482 | Supportive | | X | | X |
| Bacteroides vulgatus | HM-720 | Supportive | | | | |
| Bacteroides xylanisolvens | DSM 18836 | Supportive | | X | | X |
| Bacteroides xylanisolvens | HM-18 | Supportive | | X | | X |
| Bifidobacterium adolescentis | HM-633 | Supportive | | | | |
| Bifidobacterium angulatum | HM-1189 | Supportive | | | | |
| Bifidobacterium animalis | DSM 20104 | Supportive | | | | |
| Bifidobacterium animalis | DSMZ 10140 | Supportive | | | | |
| Bifidobacterium bifidum | ATCC 11863 | Supportive | | | | |
| Bifidobacterium breve | DSM 20213 | Supportive | | X | | X |
| Bifidobacterium catenulatum | DSM 16992 | Supportive | | X | | X |
| Bifidobacterium dentium | ATCC 27678 | Active | X | | X | |
| Bifidobacterium dentium | ATCC 27680 | Active | X | | X | |
| Bifidobacterium dentium | DSM 20221 | Active | X | | X | |
| Bifidobacterium dentium | DSM 20436 | Active | X | | X | |
| Bifidobacterium dentium | HM-868 | Active | X | | X | |
| Bifidobacterium infantis | ATCC 55813 | Supportive | | | | |
| Bifidobacterium longum | HM-845 | Supportive | | | | |
| Bifidobacterium longum | HM-846 | Supportive | | | | |
| Bifidobacterium longum | HM-847 | Supportive | | | | |
| Bifidobacterium longum | HM-848 | Supportive | | | | |
| Bifidobacterium pseudocatenulatum | DSM 20438 | Supportive | | X | | X |
| Bilophila wadsworthia | ATCC 49260 | Supportive | | X | | X |
| Bilophila wadsworthia | DSM 11045 | Supportive | | | | |
| Bittarella massiliensis | ATCC 29733 | Supportive | | X | | X |
| Bittarella massiliensis | DSM 4029 | Supportive | | | | |
| Blautia hansenii | DSM 20583 | Supportive | | X | | X |
| Blautia hydrogenotrophica | DSM 10507 | Supportive | | | | X |
| Blautia massiliensis | HM-1032 | Supportive | | X | | X |
| Blautia obeum | DSMZ 25238 | Supportive | | X | | X |
| Blautia wexlerae | DSM 19850 | Supportive | | | | X |
| Butyricimonas virosa | DSM 23226 | Supportive | | X | | X |
| Butyrivibrio crossotus | DSM 2876 | Supportive | | | | X |
| Catenibacterium mitsuokai | DSM 15897 | Supportive | | X | | X |
| Cetobacterium somerae | DSM 23941 | Supportive | | | | |
| Clostridium asparagiforme | DSM 15981 | Supportive | | X | | X |
| Clostridium bolteae | DSM 15670 | Supportive | | | | X |
| Clostridium bolteae | HM-1038 | Supportive | | | | |
| Clostridium bolteae | HM-318 | Supportive | | | | |
| Clostridium cadaveris | HM-1040 | Supportive | | | | |
| Clostridium citroniae | HM-315 | Supportive | | | | |
| Clostridium hiranonis | DSM 13275 | Supportive | | X | | X |
| Clostridium hylemonae | DSM 15053 | Supportive | | X | | X |
| Clostridium innocuum | HM-173 | Supportive | | | | |
| Clostridium leptum | DSM 753 | Supportive | | X | | X |
| Clostridium methylpentosum | DSM 5476 | Supportive | | | | X |
| Clostridium nexile | DSM 1787 | Supportive | | X | | X |
| Clostridium orbiscindens | HM-303 | Supportive | | | | X |
| Clostridium orbiscindens | HM-1044 | Supportive | | | | |
| Clostridium saccharolyticum | DSM 2544 | Supportive | | X | | X |
| Clostridium saccharolyticum | HM-635 | Supportive | | | | X |
| Clostridium scindens | DSM 5676 | Supportive | | X | | X |
| Clostridium scindens | VPI 12708 | Supportive | | | | |
| Clostridium sp. | HM-634 | Supportive | | X | | X |
| Clostridium spiroforme | DSM 1552 | Supportive | | | | X |
| Clostridium sporogenes | ATCC 15579 | Supportive | | | | |
| Clostridium sporogenes | ATCC 17889 | Supportive | | | | |
| Clostridium sporogenes | DSM 767 | Supportive | | | | |
| Clostridium symbiosum | HM-309 | Supportive | | | | |
| Clostridium symbiosum | HM-319 | Supportive | | | | |
| Collinsella aerofaciens | ATCC 25986 | Supportive | | X | | X |
| Collinsella stercoris | DSM 13279 | Supportive | | X | | X |
| Coprococcus catus | ATCC 27761 | Supportive | | | | |
| Coprococcus comes | ATCC 27758 | Supportive | | X | | X |
| Coprococcus eutactus | ATCC 27759 | Supportive | | | | X |
| Coprococcus eutactus | ATCC 51897 | Supportive | | | | |
| Coprococcus sp. | DSM 21649 | Supportive | | | | |
| Desulfovibrio piger | ATCC 29098 | Supportive | | X | | X |
| Dialister invisus | DSM 15470 | Active | X | | X | |
| Dialister pneumosintes | ATCC 51894 | Supportive | | | | |
| Dorea formicigenerans | ATCC 27755 | Supportive | | X | | X |
| Dorea longicatena | DSM 13814 | Supportive | | X | | X |
| Eggerthella lenta | ATCC 43055 | Active | X | | X | |
| Eggerthella lenta | DSM 2243 | Active | X | | X | |
| Eggerthella lenta | DSM 11767 | Supportive | | | | |
| Eggerthella lenta | DSM 11863 | Supportive | | | | |
| Eggerthella lenta | EIM-1099 | Supportive | | | | |
| Enterococcus faecalis | HM-202 | Active | X | | X | |
| Enterococcus faecalis | HM-432 | Active | | | X | |
| Ethanoligenens harbinense | DSM 18485 | Supportive | | | | X |
| Eubacterium dolichum | DSM 3991 | Supportive | | X | | X |
| Eubacterium eligens | ATCC 27750 | Supportive | | | | |
| Eubacterium rectale | ATCC 33656 | Supportive | | X | | X |
| Eubacterium siraeum | DSM 15702 | Supportive | | X | | X |
| Eubacterium ventriosum | ATCC 27560 | Supportive | | X | | X |
| Faecalibacterium prausnitzii | DSM 17677 | Supportive | | X | | X |
| Faecalibacterium prausnitzii | ATCC 27766 | Supportive | | | | |
| Faecalibacterium prausnitzii | ATCC 27768 | Supportive | | | | |
| Faecalibacterium prausnitzii | HM-473 | Supportive | | | | |
| Granulicatella adiacens | ATCC 49175 | Supportive | | X | | X |
| Holdemanella biformis | DSM 3989 | Supportive | | X | | X |
| Holdemania filiformis | DSM 12042 | Supportive | | X | | X |
| Hungatella hathewayi | DSM 13479 | Supportive | | X | | X |
| Hungatella hathewayi | HM-308 | Supportive | | | | |
| Intestinibacter bartlettii | DSM 16795 | Supportive | | | | X |
| Intestinimonas butyriciproducens | DSM 26588 | Supportive | | | | X |
| Lactobacillus acidophilus | DSM 20079 | Active | X | | X | |
| Lactobacillus acidophilus | ATCC 4357 | Active | | | | |
| Lactobacillus acidophilus | DSM 20242 | Active | | | | |
| Lactobacillus amylovorus | DSM 20552 | Supportive | | | | |
| Lactobacillus casei | ATCC 393 | Supportive | | | | |
| Lactobacillus casei | ATCC 39539 | Supportive | | | | |
| Lactobacillus crispatus | HM-370 | Supportive | | | | |
| Lactobacillus gasseri | ATCC 33323 | Active | X | | X | |
| Lactobacillus gasseri | DSMZ 107525 | Active | | | | |
| Lactobacillus gasseri | DSMZ 20077 | Active | | | | |
| Lactobacillus gasseri | HM-104 | Active | | | | |
| Lactobacillus gasseri | HM-644 | Active | | | | |
| Lactobacillus helveticus | DSM 20075 | Active | X | | X | |
| Lactobacillus johnsonii | HM-643 | Supportive | | | | |
| Lactobacillus parafarraginis | HM-478 | Supportive | | | | |
| Lactobacillus plantarum | ATCC 14917 | Supportive | | | | |
| Lactobacillus plantarum | ATCC 202195 | Supportive | | | | |
| Lactobacillus reuteri | HM-102 | Active | X | | X | |
| Lactobacillus rhamnosus | DSM 20245 | Active | X | | X | |
| Lactobacillus rhamnosus | HM-106 | Active | X | | X | |
| Lactobacillus rhamnosus | ATCC 53103 | Active | | | | |
| Lactobacillus rhamnosus | DSM 8746 | Active | | | | |
| Lactobacillus ruminis | ATCC 25644 | Supportive | | X | | X |
| Lactobacillus ruminis | DSM 20404 | Supportive | | | | |
| Lactobacillus ultunensis | DSM 16048 | Supportive | | | | |
| Lactococcus lactis | DSM 20729 | Supportive | | | | |
| Marvinbryantia formatexigens | DSM 14469 | Supportive | | X | | X |
| Megasphaera indica | DSM 25562 | Supportive | | | | |
| Megasphaera stantonii | DSM 102144 | Supportive | | X | | X |
| Methanobrevibacter smithii | DSM 11975 | Supportive | | | | |
| Methanobrevibacter smithii | DSM 2374 | Supportive | | | | |
| Methanobrevibacter smithii | DSM 2375 | Supportive | | | | |
| Methanobrevibacter smithii | DSM 861 | Supportive | | | | |
| Methanomassiliicoccus luminyensis | DSM 25720 | Supportive | | | | |
| Methanosphaera stadtmanae | DSM 3091 | Supportive | | | | |
| Mitsuokella multacida | DSM 20544 | Supportive | | X | | X |
| Odoribacter splanchnicus | DSM 20712 | Supportive | | X | | X |
| Olsenella uli | DSM 7084 | Supportive | | X | | X |
| Oscillibacter welbionis | HM-1030 | Supportive | | | | X |
| Oxalobacter formigenes | ATCC 35274 | Active | X | | X | |
| Oxalobacter formigenes | HM-1 | Active | X | | X | |
| Oxalobacter formigenes | DSM 4420 | Active | | | | |
| Oxalobacter vibrioformis | DSM 5502 | Supportive | | | | |
| Oxalophagus oxalicus | ATCC 49686 | Supportive | | | | |
| Parabacteroides distasonis | HM-19 | Supportive | | X | | X |
| Parabacteroides distasonis | HM-77 | Supportive | | X | | X |
| Parabacteroides goldsteinii | HM-1050 | Supportive | | | | |
| Parabacteroides johnsonii | DSM 18315 | Supportive | | X | | X |
| Parabacteroides johnsonii | HM-731 | Supportive | | | | |
| Parabacteroides merdae | DSM 19495 | Supportive | | | | X |
| Parabacteroides merdae | HM-729 | Supportive | | | | |
| Parabacteroides merdae | HM-730 | Supportive | | | | |
| Peptostreptococcus anaerobius | DSM 2949 | Supportive | | | | |
| Prevotella buccae | HM-45 | Supportive | | | | |
| Prevotella buccalis | DSM 20616 | Supportive | | X | | X |
| Prevotella copri | DSM 18205 | Supportive | | | | X |
| Prevotella histicola | DSM 26979 | Supportive | | | | |
| Proteocatella sphenisci | DSM 23131 | Supportive | | | | |
| Providencia rettgeri | ATCC BAA-2525 | Supportive | | | | |
| Roseburia intestinalis | DSM 14610 | Supportive | | | | |
| Roseburia inulinivorans | DSM 16841 | Supportive | | X | | X |
| Ruminococcaceae sp. | HM-79 | Supportive | | | | |
| Ruminococcus albus | ATCC 27210 | Supportive | | | | |
| Ruminococcus bromii | ATCC 27255 | Supportive | | | | |
| Ruminococcus bromii | ATCC 51896 | Supportive | | | | |
| Ruminococcus gauvreauii | DSM 19829 | Supportive | | X | | X |
| Ruminococcus gnavus | ATCC 29149 | Supportive | | X | | X |
| Ruminococcus gnavus | DSM 108212 | Supportive | | | | |
| Ruminococcus gnavus | HM-1056 | Supportive | | | | |
| Ruminococcus lactaris | ATCC 29176 | Supportive | | | | X |
| Ruminococcus lactaris | HM-1057 | Supportive | | | | |
| Ruminococcus torques | ATCC 27756 | Supportive | | X | | X |
| s_Parabacteroides distasonis | ATCC 8503 | Supportive | | X | | X |
| Slackia exigua | DSM 15923 | Supportive | | | | X |
| Slackia heliotrinireducens | DSM 20476 | Supportive | | | | X |
| Solobacterium moorei | DSM 22971 | Supportive | | X | | X |
| Streptococcus thermophilus | ATCC BAA-491 | Supportive | | X | | X |
| Streptococcus thermophilus | ATCC 14485 | Supportive | | | | |
| Subdoligranulum variabile | DSM 15176 | Supportive | | | | X |
| Turicibacter sanguinis | DSM 14220 | Supportive | | | | X |
| Veillonella dispar | ATCC 17748 | Supportive | | | | |
| Veillonella parvula | HM-49 | Supportive | | | | |
| Veillonella parvula | HM-64 | Supportive | | | | |

[0301] FIG. 5A and FIG. 5B show the % body weight gain and food consumption, respectively, of the uncolonized mice, mice gavaged with either O. formigenes alone, active microbes alone, supportive microbes alone, or a complete microbial consortium (active and supportives) as described above.

[0302] Table 9 shows the incidence of diarrhea in the uncolonized mice, mice gavaged with either O. formigenes alone, active microbes alone, supportive microbes alone, or a complete microbial consortium (active and supportives) as described above. Mice treated with a complete microbial consortium were observed to have normal stool pellets and a reduced incidence of diarrhea.

TABLE 9

| Uncolonized | | O. formigenes | | Actives | | Supportives | | Full Community | |
|---|---|---|---|---|---|---|---|---|---|
| Control | Oxalate | Control | Oxalate | Control | Oxalate | Control | Oxalate | Control | Oxalate |
| Diet | Diet | Diet | Diet | Diet | Diet | Diet | Diet | Diet | Diet |
| 3/3 | 3/3 | 3/3 | 3/3 | 3/3 | 3/3 | 3/3 | 3/3 | 0/3 | 0/3 |

| | | |
|---|---|---|
| Runny stool | Soft stool | Normal stool |

[0303] Table 10 shows the incidence of fatty liver in the uncolonized mice, mice gavaged with either O. formigenes alone, active microbes alone, supportive microbes alone, or a complete microbial consortium (active and supportives) as described above.

TABLE 10

| Uncolonized | | O. formigenes | | Actives | | Supportives | | Full Community | |
|---|---|---|---|---|---|---|---|---|---|
| Control | Oxalate | Control | Oxalate | Control | Oxalate | Control | Oxalate | Control | Oxalate |
| Diet | Diet | Diet | Diet | Diet | Diet | Diet | Diet | Diet | Diet |
| 0/3 | 0/3 | 1/3 | 2/3 | 0/3 | 1/3 | 0/3 | 2/3 | 0/3 | 0/3 |

| | | |
|---|---|---|
| No Fatty Liver | Fatty Liver observed in 6/18 mice | No Fatty Liver |

### Urinary Oxalate Concentrations

[0304] To assess the effect of a microbial consortium described herein on steady-state levels of oxalate in urine, which correlates well with human urolithiasis, urine was terminally collected from all test groups. Each mouse was transferred to the bottom of a standard petri dish, placed into a CO₂ chamber, and administered CO₂ for 90 seconds according to the approved IACUC protocol until the mouse ceased moving and was lying prone on the chamber floor. The CO₂ chamber lid was opened and the anaesthetized mouse was placed on its side on the petri dish. The CO₂ chamber lid was then replaced and terminal urination collected in the petri dish and transferred to a sterile microcentrifuge tube. Urine samples were processed and prepared for solid phase extraction followed by LC/MS-based analysis as described in Example 4 above.

[0305] As shown in Table 11 and FIG. 6A-B, mice fed with control diet lacking supplemental oxalate predictably exhibited low levels of urinary oxalate (1.2 mM in uncolonized controls) compared with mice fed a diet containing excess oxalate (11.9 mM in uncolonized controls), showing that dietary supplementation with oxalate can induce hyperoxaluria in gnotobiotic mice.

[0306] Regardless of diet, the lowest levels of urinary oxalate were observed in mice colonized with the complete microbial consortium (active and supportives); average oxalate levels in consortium-colonized mice fed the oxalate-free (control) diet were approximately 50% lower than observed in uncolonized mice, and in animals fed the high oxalate diet, steady-state urinary oxalate levels were approximately 66% lower in consortium-colonized mice compared to uncolonized controls (4.5 mM vs. 11.9 mM).

[0307] Mice treated with a complete microbial consortium outperformed mice treated with the plurality of active microbes and supportive community of microbes alone, as well as mice treated with O. formigenes alone, with respect to urinary oxalate concentrations. Mice colonized with O. formigenes alone or the plurality of active microbes alone and fed the oxalate-supplemented diet exhibited urinary oxalate concentrations that were not significantly different from those observed in uncolonized mice. Furthermore, mice colonized with the supportive community of microbes alone exhibited significantly higher urinary oxalate levels than uncolonized controls (16.7 mM and 11.9 mM, respectively). Whereas colonization with either the plurality of active microbes alone or the supportive community alone did not reduce levels of urinary oxalate, colonization with the full consortium resulted in a synergistic drop in urinary oxalate concentration.

TABLE 11

Urinary Oxalate (mM)
n = 3 mice/group

| Communities | Oxalate Diet | Control Diet |
|---|---|---|
| Control (gnotobiotic) | 11.9 ± 1.8 | 1.2 ± 0.2 |
| Supportive Community only | 16.7 ± 3.0 | 0.6 ± 0.1 |
| O. formigenes only | 10.5 ± 2.2 | 1.2 ± 0.2 |
| Plurality of Active Microbes only | 9.5 ± 0.4 | 1.5 ± 0.2 |
| Full Microbial Consortium | 4.5 ± 0.1 | 0.6 ± 0.1 |
| (Active ± Supportive) | | |

### Serum Liver Enzyme Assay

[0308] Mouse serum samples were analyzed for a standard panel of serum liver enzymes by the Charles River Laboratories. FIGS. 7A, 7B, 7C, 7D, 7E, 7F, 7G, and 7H show serum levels or function of alanine transaminase, aspartate transaminase, albumin, alanine phosphatase, albumin/globulin ratio, total bilirubin, gamma-glutamyl transferase, and prothrombin time, respectively, in gnotobiotic Balb/c mice on a normal (non-bold) or high oxalate diet (bold), treated by gavage with Oxalobacter formigenes only (O. formigenes), active strains only (Active), supportive strains only (Supportive), both active and supportive strains (Active and Supportive), or saline vehicle control (Saline) as described above.

### Kidney Function Assay

[0309] Mouse serum samples were analyzed for a standard panel of serum kidney metabolites/electrolytes by the Charles River Laboratories. FIGS. 8A, 8B, 8C, 8D, 8E, 8F, 8G, and 8H show serum levels of urea, creatinine, phosphorus, calcium, chloride, sodium, potassium, and globulin, respectively, in gnotobiotic Balb/c mice on a normal (non-bold) or high oxalate diet (bold), treated by gavage with Oxalobacter formigenes only (O. formigenes), active strains only (Active), supportive strains only (Supportive), both active and supportive strains (Active+Supportive), or saline vehicle control (Saline) as described above.

### Triglyceride, Cholesterol, Glucose and Creatine Kinase Assay

[0310] Mouse serum samples were analyzed for a standard triglyceride, cholesterol, glucose and creatine kinase panel by the Charles River Laboratories. FIGS. 9A, 9B, 9C, and 9D shows serum triglyceride, cholesterol, glucose, and creatine kinase levels, respectively, in gnotobiotic Balb/c mice on a normal (non-bold) or high oxalate diet (bold), treated by gavage with Oxalobacter formigenes only (O. formigenes), active strains only (Active), supportive strains only (Supportive), both active and supportive strains (Active+Supportive), or saline vehicle control as described above.

### Example 6: In Vivo Oxalate Metabolization in C57/B6 Female Mice Treated with a Microbial Consortium Containing Commercial Strains of Microbes

[0311] This example describes a study testing the ability of a microbial consortium, containing commercially-sourced strains of microbes, to degrade oxalate in vivo in C57/B6 female mice.

[0312] To test whether the in vivo activity of a microbial consortium as presently described was observed in a different sex and strain of study mouse, female C57/B6 mice (n=3 per condition) were colonized by oral gavage with either a plurality of active microbes alone, a supportive community alone, a supportive community plus O. formigenes alone, a supportive community plus a plurality of active microbes lacking O. formigenes, a complete microbial consortium (active and supportive s), or a fecal sample from a human donor found to be positive for O. formigenes DNA. The plurality of active microbes and the supportive community contained the strains in Table 8 marked with an ‘X’ in the indicated columns. Colonized mice were fed either a defined, low-complexity diet supplemented with excess oxalate in order to induce hyperoxaluria (see Table 2 above) or a nutritionally equivalent control diet lacking oxalate (see Table 1 above). After a two-week period, mice were sacrificed and urine, stool, serum and tissue samples were collected for analysis.

### Urinary Oxalate Concentrations

[0313] Urine was terminally collected from all groups and processed for solid phase extraction followed by LC-MS-based analysis of oxalate concentrations as described in Example 4. Absolute oxalate concentrations detected in individual urine samples were normalized based on the ratio of oxalate to creatinine.

[0314] As shown in Table 12, urinary oxalate levels were reduced in mice colonized with the complete microbial consortium. Partial reduction was also observed in mice colonized with the supportive community alone, the supportive community plus the plurality of active microbes lacking O. formigenes, and the plurality of active microbes alone.

TABLE 12

| | Normalized Urinary | |
|---|---|---|
| | Oxalate (mM) | |
| | n = 3 mice/group | |
| | | % of Urinary |
| | Oxalate:Cre- | Oxalate |
| | atinine | (normalized) in |
| Communities | (μM) | Supportive Only |
| Control (gnotobiotic) | 4.5 ± 0.73 | 120.4% ± 19.6 |
| Supportive Community only | 3.74 ± 1.27 | 100.0% ± 34.0 |
| Plurality of Active Microbes | 2.13 ± 1.81 | 57% ± 48.4 |
| only | | |
| Supportive Community + | 2.10 ± 0.90 | 56.1% ± 24.0 |
| O. formigenes | | |
| Supportive Community + | 2.82 ± 1.94 | 75.5% ± 52.0 |
| Plurality of Active | | |
| Microbes (minus O. formigenes) | | |
| Full Microbial Consortium | 0.91 ± 0.42 | 24.3% ± 11.3 |
| (Active + Supportive) | | |
| Human donor fecal sample | 1.64 ± 1.49 | 44.0% ± 40.0 |
| (O. formigenes positive) | | |

### Example 7: In Vivo Oxalate Metabolization in C57/B6 Female Mice Treated with Frozen Stocks of Microbial Consortium

[0315] To test whether a microbial consortium as presently described maintains in vivo activity after freezing, individual live microbial cultures of commercially-sourced strains were pooled in approximately equal proportions to form a supportive community alone, a supportive community plus a plurality of active microbes lacking O. formigenes, and an O. formigenes community comprising two commercial strains of O. formigenes, and frozen as aliquots in 30% glycerol in the vapor phase of a liquid nitrogen dewar for one month prior to administration to mice. The plurality of active microbes and the supportive community contained the strains in Table 8 marked with an ‘X’ in the indicated column.

[0316] Gnotobiotic, female, C57/B6 mice (n=3 per condition) were colonized by oral gavage with either a plurality of active microbes alone (including O. formigenes), a supportive community alone, or a complete microbial consortium (active and supportives). Hyperoxaluria was induced in colonized mice by providing ad libitum drinking water sweetened with sucralose and containing 0.875% oxalate. Control mice were provided with sucralose-sweetened drinking water without oxalate. All mice were maintained on a standard Autoclavable Mouse Breeder Diet (LabDiet®, St. Louis, Mo.). After a two week period, mice were sacrificed and a variety of samples were collected including urine, stool, serum, and kidneys.

### Urinary Oxalate Concentrations

[0317] As in Example 6, urine was terminally collected from all groups and processed for solid phase extraction followed by LC/MS-based analysis of oxalate concentrations. Absolute oxalate concentrations detected in individual urine samples were normalized based on the ratio of oxalate to creatinine.

[0318] As shown in Table 13, mice provided with drinking water containing 0.875% oxalate exhibited significantly elevated levels of urinary oxalate compared with mice given control water (e.g., an approximate 4-fold increase in both the mice administered with the plurality of active microbes alone and the mice administered with the supportive community alone). Consistent with Examples 5 and 6, mice colonized with the complete microbial consortium had significantly lower urinary oxalate levels compared with the mice administered with the plurality of active microbes alone or the mice administered with the supportive community alone. Furthermore, as compared to Examples 5 and 6, the complete microbial consortium still exhibited significant oxalate metabolizing activity in mice maintained on a markedly different standard dietary formulation

TABLE 13

| | | |
|---|---|---|
| | Oxalate:Creatinine | |
| Communities | (μM) | SD |

No Oxalate Treatment

| | | |
|---|---|---|
| Supportive Community + | 0.254 | 0.021 |
| Plurality of Active Microbes | | |
| Supportive Community only | 0.246 | 0.025 |
| Plurality of Active Microbes only | 0.279 | 0.019 |

0.875% Oxalate Treatment

| | | |
|---|---|---|
| Supportive Community + | 0.618 | 0.085 |
| Plurality of Active Microbes | | |
| Supportive Community only | 0.937 | 0.111 |
| Plurality of Active Microbes only | 2.427 | 2.284 |

### Example 8: In Vivo Engraftment of Oxalate-Metabolizing Microbial Strains

[0319] Stool samples from the treated mice described in Example 5 were analyzed for the presence of oxalate-metabolizing microbial strains by whole genome shotgun sequencing of microbial DNA extracted from fecal pellets. DNA extraction from fecal samples and whole genome shotgun sequencing were performed by methods as previously described in Example 1. Sequence reads were mapped against a comprehensive database of complete, sequenced genomes of all the defined microbial strains comprising the microbial consortium. The results of this experiment are summarized in FIGS. 10A-F.

[0320] Table 14 shows detection of engrafted oxalate-metabolizing active microbial strains in the treated mice described in Example 5. Microbial strains were counted as “detected” if their relative abundance was >0.1% of total sequence reads.

TABLE 14

| | | | Actives + | Actives + |
|---|---|---|---|---|
| | Actives- | Actives- | Sup- | Sup- |
| | only | only | portives | portives |
| Active community | (Control | (Oxalate | (Control | (Oxalate |
| component | Diet) | Diet) | Diet) | Diet) |
| Oxalobacter formigenes | 0% | 100% | 0% | 100% |
| Bifidobacterium dentium | 100% | 100% | 0% | 0% |
| Eggerthella lenta | 100% | 100% | 0% | 0% |
| Enterococcus faecalis | 100% | 100% | 0% | 0% |
| Lactobacillus rhamnosus | 100% | 100% | 0% | 0% |
| Dialister invisus | 33.3% | 66.6% | 0% | 0% |
| Lactobacillus helveticus | 33.3% | 0% | 0% | 0% |
| Lactobacillus acidophilus | 0% | 0% | 0% | 0% |
| Lactobacillus gasseri | 0% | 0% | 0% | 0% |
| Lactobacillus reuteri | 0% | 0% | 0% | 0% |

[0321] Table 15 shows detection of engrafted supportive microbial strains in the treated mice described in Example 5. Microbial strains were counted as “detected” if their relative abundance was >0.1% of total sequence reads.

TABLE 15

| | Sup- | Sup- | Actives + | Actives + |
|---|---|---|---|---|
| | portives- | portives- | Sup- | Sup- |
| | only | only | portives | portives |
| Supportive Community | (Control | (Oxalate | (Control | (Oxalate |
| Component | Diet) | Diet) | Diet) | Diet) |
| 13 species | 100% | 100% | 100% | 100% |
| Alistipes senegalensis | 100% | 0% | 66.6% | 100% |
| Catenibacterium | 100% | 0% | 66.6% | 100% |
| mitsuokai | | | | |
| Bacteroides coprocola | 0% | 0% | 0% | 100% |
| Clostridium scindens | 0% | 0% | 66.6% | 66.6% |
| Bacteroides | 100% | 0% | 66.6% | 0% |
| cellulosilyticus | | | | |
| Tyzzerella nexilis | 100% | 0% | 66.6% | 0% |
| 17 species | 0 to | 0 to | 0 to | 0 to |
| | 100% | 100% | 100% | 100% |
| 33 species | 0% | 0% | 0% | 0% |

### Example 9: In Vitro Oxalate Metabolization by Donor-Derived Strains

[0322] In order to determine the in vitro oxalate-metabolizing activity of three donor-derived O. formigenes strains, strains were grown in YFCAC base medium at either pH 7.0, 6.0, or 5.0 in the presence of 80 mM oxalate. Strains were incubated at 37° C. for 72, and at the conclusion of the protocol the amount of oxalate in the medium was quantified by LC-MS as described in Example 4. For all three strains, the amount of oxalate remaining in the culture medium after 72 hours was below the limit of detection when assayed at pH 7.0 or 6.0. No oxalate degradation was detected for cultures of any of the three strains when incubated at pH 5.0.

[0323] To determine the oxalate-metabolizing activity of additional donor-derived microbial strains, strains were grown in anaerobic conditions in YCFAC base medium at either pH 7.0, 6.0, or 5.0 in the presence of 2 mM oxalate. Strains were incubated at 37° C. for 120 hours, and at the conclusion of the protocol the amount of oxalate in the medium was quantified by LC/MS as described in Example 4. A donor-derived strain of O. formigenes was included as a positive control. Results are reported as the percentage of oxalate remaining in the media at the conclusion of the assay relative to the starting concentration (FIG. 11). As expected, the amount of oxalate remaining in a culture of donor-derived O. formigenes was below the limit of detection when assayed at pH 6 or pH 7, although no oxalate degradation was detected at pH 5. By contrast, none of the other tested donor-derived isolates were found to reduce oxalate by more than 11% at any pH tested.

### Example 10: Growth of Donor-Derived O. formigenes Strains at Different pHs and Oxalate Concentrations

[0324] Three O. formigenes strains isolated from donor fecal samples were assayed for their ability to grow at different pHs (5.0, 6.0, or 7.0) and at different oxalate concentrations (0 mM, 2 mM, 40 mM, 80 mM, 120 mM, 160 mM). Strains were grown under anaerobic conditions in the appropriate banking medium, and culture turbidity was recorded after 24, 48, 72, and 144 hours. The results of this assay are reported in FIGS. 12A-12C. One O. formigenes strain (FBI00067) was observed to grow better at a lower pH; another strain (FBI00133) was observed to be more tolerant of higher oxalate concentrations.

### Example 11: Design of Supportive Communities Comprising Donor-Derived Strains

[0325] Supportive communities of microbes were designed using donor-derived strains. Five candidate communities were designed according to different design principles.

[0326] The supportive community of candidate consortium I was designed to incorporate all isolated species that were present in more than 50% of a set of healthy donor fecal samples. The community further included donor-derived strains whose identified species had been represented in the proof-of-concept consortium of commercial strains, or (if no matching species had been isolated) then a strain of the species that was the closest relative within the genus. The final consortium (actives and supportives) contained 152 strains and 70 species in total, listed in Table 16.

[0327] The supportive communities of candidate consortia II and III were designed to maximize consumption and/or production of a defined set of metabolites using a minimal number of strains. In both cases, metabolites of interest were identified by conducting a literature review, as well as by bioinformatic annotation of healthy microbiomes. Next, the genomes of donor-derived strains were bioinformatically analyzed to identify strains capable of producing or consuming said metabolites of interest. A literature review was also conducted to identify donor-derived strains belonging to species known to consume and/or produce each metabolite of interest. Donor-derived strains were scored for their ability to produce or consume said metabolite, and the community was designed to maximize the desired metabolic coverage with the fewest number of species. The supportive community of candidate consortium II was designed to enrich for consumption of 51 dietary carbon and energy sources. The supportive community of candidate consortia III was designed to enrich for the production or consumption of metabolites present in the host, including bile acids, sugars, amino acids, vitamins, SCFAs, and gasses. The strains included in candidate consortium II are listed in Table 17, and the strains included in candidate consortium III are listed in Table 18.

[0328] The supportive community of candidate consortium IV was constructed using strains isolated exclusively from fecal samples of two healthy donors. Sourcing many supportive strains from one or a small number of donors may have the benefit of enhancing co-culturability and/or ecological stability. The two specific donors selected both had stool that was found to be capable of reducing urinary oxalate in vivo, potentially enhancing the use of the community in embodiments of the invention designed to degrade oxalate. The strains included in candidate consortium IV are listed in Table 19.

[0329] The supportive community of candidate consortium V was designed to include all strains isolated from healthy donor fecal samples, with the exception of species known to be associated with pathogenesis. This diverse community incorporated species from all five major phyla that comprise normal gut commensals (Bacteroidetes, Firmicutes, Actinobacteria, Proteobacteria, and Verrucomicrobia). The final consortium contained 103 species and 158 strains in total, which are listed in Table 20.

TABLE 16

| | | | | NCBI | | | |
|---|---|---|---|---|---|---|---|
| Strain | | | | Taxonomy | | % Match | SEQ ID |
| # | Species ID | Kingdom | Phylum | ID | Closest 16S Species | (16S) | NO: X |
| FBI00001 | Clostridium citroniae | bacteria | firmicutes | 358743 | Clostridium citroniae | 99.64 | 1 |
| FBI00002 | Bacteroides salyersiae | bacteria | bacteroidetes | 291644 | Bacteroides salyersiae | 99.5 | 2 |
| FBI00004 | Neglecta timonensis | bacteria | firmicutes | 1776382 | Neglecta timonensis | 99.14 | 4 |
| FBI00008 | Blautia luti | bacteria | firmicutes | 89014 | Blautia luti | 97.02 | 8 |
| FBI00010 | Blautia obeum | bacteria | firmicutes | 40520 | Blautia obeum | 98.12 | 10 |
| FBI00011 | Bifidobacterium longum | bacteria | actinobacteria | 216816 | Bifidobacterium longum | 99.28 | 11 |
| FBI00012 | Alistipes onderdonkii | bacteria | bacteroidetes | 328813 | Alistipes onderdonkii | 99.71 | 12 |
| FBI00013 | Parabacteroides merdae | bacteria | bacteroidetes | 46503 | Parabacteroides merdae | 99.5 | 13 |
| FBI00015 | Bacteroides uniformis | bacteria | bacteroidetes | 820 | Bacteroides uniformis | 99.78 | 15 |
| FBI00016 | Bifidobacterium | bacteria | actinobacteria | 28026 | Bifidobacterium | 99.64 | 16 |
| | pseudocatenulatum | | | | pseudocatenulatum | | |
| FBI00017 | Blautia obeum | bacteria | firmicutes | 40520 | Blautia obeum | 98.34 | 17 |
| FBI00018 | Eubacterium rectale | bacteria | firmicutes | 39491 | Eubacterium rectale | 99.71 | 18 |
| FBI00019 | Alistipes timonensis | bacteria | bacteroidetes | 1465754 | Alistipes timonensis | 99.78 | 19 |
| FBI00020 | Bacteroides | bacteria | bacteroidetes | 818 | Bacteroides | 99.57 | 20 |
| | thetaiotaomicron | | | | thetaiotaomicron | | |
| FBI00022 | Alistipes putredinis | bacteria | bacteroidetes | 28117 | Alistipes putredinis | 99.93 | 22 |
| FBI00025 | Coprococcus comes | bacteria | firmicutes | 410072 | Coprococcus comes | 99.21 | 25 |
| FBI00029 | Parabacteroides distasonis | bacteria | bacteroidetes | 823 | Parabacteroides distasonis | 99.26 | 29 |
| FBI00030 | Eggerthella lenta | bacteria | firmicutes | 84112 | Eggerthella lenta | 98.47 | 30 |
| FBI00032 | Anaerostipes hadrus | bacteria | firmicutes | 649756 | Anaerostipes hadrus | 99.64 | 32 |
| FBI00033 | Lachnospiraceae sp. FBI00033 | bacteria | firmicutes | 186803 | Clostridium amygdalinum | 93.56 | 33 |
| FBI00034 | Eubacterium eligens | bacteria | firmicutes | 39485 | Eubacterium eligens | 98.78 | 34 |
| FBI00036 | Blautia faecis | bacteria | firmicutes | 871665 | Blautia faecis | 99.53 | 36 |
| FBI00038 | Coprococcus eutactus | bacteria | firmicutes | 33043 | Coprococcus eutactus | 95.96 | 38 |
| FBI00039 | Bacteroides vulgatus | bacteria | bacteroidetes | 821 | Bacteroides vulgatus | 99.71 | 39 |
| FBI00040 | Bilophila wadsworthia | bacteria | proteobacteria | 35833 | Desulfovibrio desulfuricans | 91.38 | 40 |
| FBI00042 | Bacteroides xylanisolvens | bacteria | bacteroidetes | 371601 | Bacteroides xylanisolvens | 99.71 | 42 |
| FBI00043 | Bifidobacterium dentium | bacteria | actinobacteria | 1689 | Bifidobacterium dentium | 99.35 | 43 |
| FBI00044 | Blautia wexlerae | bacteria | firmicutes | 418240 | Blautia wexlerae | 98.69 | 44 |
| FBI00046 | Bacteroides caccae | bacteria | bacteroidetes | 47678 | Bacteroides caccae | 99.71 | 46 |
| FBI00047 | Eubacterium eligens | bacteria | firmicutes | 39485 | Eubacterium eligens | 98.79 | 47 |
| FBI00050 | Bacteroides nordii | bacteria | bacteroidetes | 291645 | Bacteroides nordii | 98.63 | 50 |
| FBI00051 | Dorea formicigenerans | bacteria | firmicutes | 39486 | Dorea formicigenerans | 98.07 | 51 |
| FBI00052 | Bacteroides xylanisolvens | bacteria | bacteroidetes | 371601 | Bacteroides xylanisolvens | 99.14 | 52 |
| FBI00056 | Clostridium citroniae | bacteria | firmicutes | 358743 | Clostridium citroniae | 99.2 | 56 |
| FBI00057 | Dorea longicatena | bacteria | firmicutes | 88431 | Dorea longicatena | 99.7 | 57 |
| FBI00058 | Eubacterium rectale | bacteria | firmicutes | 39491 | Eubacterium rectale | 99.71 | 58 |
| FBI00059 | Bacteroides stercorirosoris | bacteria | bacteroidetes | 871324 | Bacteroides oleiciplenus | 98.81 | 59 |
| FBI00060 | Bifidobacterium longum | bacteria | actinobacteria | 216816 | Bifidobacterium longum | 99.49 | 60 |
| FBI00061 | Alistipes shahii | bacteria | bacteroidetes | 328814 | Alistipes shahii | 99.19 | 61 |
| FBI00062 | Collinsella aerofaciens | bacteria | actinobacteria | 74426 | Collinsella aerofaciens | 99.48 | 62 |
| FBI00066 | Parasutterella excrementihominis | bacteria | proteobacteria | 487175 | Parasutterella excrementihominis | 99.13 | 66 |
| FBI00067 | Oxalobacter formigenes | bacteria | proteobacteria | 847 | Oxalobacter formigenes | 98.84 | 67 |
| FBI00068 | Akkermansia muciniphila | bacteria | verrucomicrobia | 239935 | Akkermansia muciniphila | 99.42 | 68 |
| FBI00069 | Ruminococcus bromii | bacteria | firmicutes | 40518 | Ruminococcus bromii | 98.84 | 69 |
| FBI00072 | Coprococcus eutactus | bacteria | firmicutes | 33043 | Coprococcus eutactus | 96.17 | 72 |
| FBI00073 | Parabacteroides distasonis | bacteria | bacteroidetes | 823 | Parabacteroides distasonis | 98.99 | 73 |
| FBI00074 | Clostridium fessum | bacteria | firmicutes | 2126740 | Clostridium symbiosum | 94.03 | 74 |
| FBI00075 | Paraprevotella clara | bacteria | bacteroidetes | 454154 | Paraprevotella clara | 98.85 | 75 |
| FBI00076 | Bacteroides thetaiotaomicron | bacteria | bacteroidetes | 818 | Bacteroides thetaiotaomicron | 99.78 | 76 |
| FBI00078 | Blautia obeum | bacteria | firmicutes | 40520 | Blautia obeum | 98.34 | 78 |
| FBI00085 | Ruminococcus bromii | bacteria | firmicutes | 40518 | Ruminococcus bromii | 98.62 | 85 |
| FBI00086 | Ruminococcus bromii | bacteria | firmicutes | 40518 | Ruminococcus bromii | 98.77 | 86 |
| FBI00087 | Clostridium scindens | bacteria | firmicutes | 29347 | Clostridium scindens | 98.28 | 87 |
| FBI00090 | Eubacterium eligens | bacteria | firmicutes | 39485 | Eubacterium eligens | 98.71 | 90 |
| FBI00091 | Eubacterium rectale | bacteria | firmicutes | 39491 | Eubacterium rectale | 99.86 | 91 |
| FBI00093 | Roseburia hominis | bacteria | firmicutes | 301301 | Roseburia hominis | 99.71 | 93 |
| FBI00096 | Eggerthella lenta | bacteria | actinobacteria | 84112 | Eggerthella lenta | 98.76 | 96 |
| FBI00099 | Gordonibacter pamelaeae | bacteria | actinobacteria | 471189 | Gordonibacter pamelaeae | 99.56 | 99 |
| FBI00101 | Faecalibacterium prausnitzii | bacteria | firmicutes | 853 | Faecalibacterium prausnitzii | 97.97 | 101 |
| FBI00102 | Clostridium fessum | bacteria | firmicutes | 2126740 | Clostridium symbiosum | 94.31 | 102 |
| FBI00104 | Blautia wexlerae | bacteria | firmicutes | 418240 | Blautia luti | 97.18 | 104 |
| FBI00109 | Coprococcus comes | bacteria | firmicutes | 410072 | Coprococcus comes | 98.39 | 109 |
| FBI00111 | Bacteroides vulgatus | bacteria | bacteroidetes | 821 | Bacteroides vulgatus | 99.43 | 111 |
| FBI00112 | Bacteroides uniformis | bacteria | bacteroidetes | 820 | Bacteroides uniformis | 99.78 | 112 |
| FBI00113 | Parabacteroides merdae | bacteria | bacteroidetes | 46503 | Parabacteroides merdae | 99.79 | 113 |
| FBI00115 | Dorea formicigenerans | bacteria | firmicutes | 39486 | Dorea formicigenerans | 97.98 | 115 |
| FBI00116 | Ruminococcus faecis | bacteria | firmicutes | 592978 | Ruminococcus faecis | 99.57 | 116 |
| FBI00117 | Blautia faecis | bacteria | firmicutes | 871665 | Blautia faecis | 99.52 | 117 |
| FBI00118 | Blautia faecis | bacteria | firmicutes | 871665 | Blautia faecis | 99.84 | 118 |
| FBI00120 | Hungatella effluvii | bacteria | firmicutes | 154046 | Hungatella hathewayi | 98.78 | 120 |
| FBI00122 | Bacteroides uniformis | bacteria | bacteroidetes | 820 | Bacteroides uniformis | 99.57 | 122 |
| FBI00123 | Roseburia hominis | bacteria | firmicutes | 301301 | Roseburia hominis | 100 | 123 |
| FBI00124 | Anaerostipes hadrus | bacteria | firmicutes | 649756 | Anaerostipes hadrus | 99.86 | 124 |
| FBI00125 | Bacteroides stercoris | bacteria | bacteroidetes | 46506 | Bacteroides stercoris | 99.64 | 125 |
| FBI00126 | Bifidobacterium adolescentis | bacteria | actinobacteria | 1680 | Bifidobacterium adolescentis | 98.98 | 126 |
| FBI00127 | Collinsella aerofaciens | bacteria | actinobacteria | 74426 | Collinsella aerofaciens | 98.81 | 127 |
| FBI00130 | Coprococcus comes | bacteria | firmicutes | 410072 | Coprococcus comes | 99.35 | 130 |
| FBI00132 | Gordonibacter pamelaeae | bacteria | actinobacteria | 471189 | Gordonibacter pamelaeae | 99.48 | 132 |
| FBI00133 | Oxalobacter formigenes | bacteria | proteobacteria | 847 | Oxalobacter formigenes | 99.21 | 133 |
| FBI00135 | Bifidobacterium | bacteria | actinobacteria | 28026 | Bifidobacterium | 99.57 | 135 |
| | pseudocatenulatum | | | | pseudocatenulatum | | |
| FBI00137 | Bacteroides fragilis | bacteria | bacteroidetes | 817 | Bacteroides fragilis | 99.71 | 137 |
| FBI00138 | Blautia massiliensis | bacteria | firmicutes | 1737424 | Blautia luti | 97.94 | 138 |
| FBI00139 | Bacteroides thetaiotaomicron | bacteria | bacteroidetes | 818 | Bacteroides thetaiotaomicron | 99.5 | 139 |
| FBI00142 | Clostridium fessum | bacteria | firmicutes | 2126740 | Clostridium symbiosum | 94.07 | 142 |
| FBI00143 | Parabacteroides merdae | bacteria | bacteroidetes | 46503 | Parabacteroides merdae | 99.07 | 143 |
| FBI00145 | Bifidobacterium adolescentis | bacteria | actinobacteria | 1680 | Bifidobacterium adolescentis | 99.14 | 145 |
| FBI00147 | Clostridium bolteae | bacteria | firmicutes | 208479 | Clostridium bolteae | 99.28 | 147 |
| FBI00151 | Clostridium aldenense | bacteria | firmicutes | 358742 | Clostridium aldenense | 98.55 | 151 |
| FBI00152 | Dialister invisus | bacteria | firmicutes | 218538 | Dialister invisus | 99.58 | 152 |
| FBI00155 | Blautia obeum | bacteria | firmicutes | 40520 | Blautia obeum | 98.7 | 155 |
| FBI00162 | Bifidobacterium catenulatum | bacteria | actinobacteria | 1686 | Bifidobacterium catenulatum | 99.14 | 162 |
| FBI00164 | Bacteroides stercoris | bacteria | bacteroidetes | 46506 | Bacteroides stercoris | 98.56 | 164 |
| FBI00165 | Bacteroides massiliensis | bacteria | bacteroidetes | 204516 | Bacteroides massiliensis | 99.71 | 165 |
| FBI00167 | Dorea longicatena | bacteria | firmicutes | 88431 | Dorea longicatena | 99.39 | 167 |
| FBI00168 | Collinsella aerofaciens | bacteria | actinobacteria | 74426 | Collinsella aerofaciens | 99.26 | 168 |
| FBI00169 | Parabacteroides distasonis | bacteria | bacteroidetes | 823 | Parabacteroides distasonis | 98.7 | 169 |
| FBI00170 | Eggerthella lenta | bacteria | actinobacteria | 84112 | Eggerthella lenta | 98.61 | 170 |
| FBI00171 | Bilophila wadsworthia | bacteria | proteobacteria | 35833 | Desulfovibrio desulfuricans | 91.45 | 171 |
| FBI00172 | Bifidobacterium longum | bacteria | actinobacteria | 216816 | Bifidobacterium longum | 99.05 | 172 |
| FBI00173 | Bacteroides vulgatus | bacteria | bacteroidetes | 821 | Bacteroides vulgatus | 100 | 173 |
| FBI00175 | Holdemanella biformis | bacteria | firmicutes | 1735 | Holdemanella biformis | 98.19 | 175 |
| FBI00177 | Parasutterella excrementihominis | bacteria | proteobacteria | 487175 | Parasutterella excrementihominis | 99.71 | 177 |
| FBI00180 | Alistipes sp. FBI00180 | bacteria | bacteroidetes | 239759 | Alistipes senegalensis | 97.56 | 180 |
| FBI00181 | Blautia wexlerae | bacteria | firmicutes | 418240 | Blautia wexlerae | 97.17 | 181 |
| FBI00182 | Bacteroides coprocola | bacteria | bacteroidetes | 310298 | Bacteroides coprocola | 99.64 | 182 |
| FBI00186 | Coprococcus comes | bacteria | firmicutes | 410072 | Coprococcus comes | 99.06 | 186 |
| FBI00188 | Blautia faecis | bacteria | firmicutes | 871665 | Blautia faecis | 99.05 | 188 |
| FBI00190 | Bacteroides finegoldii | bacteria | bacteroidetes | 338188 | Bacteroides finegoldii | 98.91 | 190 |
| FBI00193 | Alistipes onderdonkii | bacteria | bacteroidetes | 328813 | Alistipes onderdonkii | 99.64 | 193 |
| FBI00194 | Ruminococcus faecis | bacteria | firmicutes | 592978 | Ruminococcus faecis | 98.41 | 194 |
| FBI00199 | Clostridium bolteae | bacteria | firmicutes | 208479 | Clostridium bolteae | 99.28 | 199 |
| FBI00201 | Eggerthella lenta | bacteria | actinobacteria | 84112 | Eggerthella lenta | 98.83 | 201 |
| FBI00205 | Blautia massiliensis | bacteria | firmicutes | 1737424 | Blautia luti | 97.55 | 205 |
| FBI00206 | Bacteroides xylanisolvens | bacteria | bacteroidetes | 371601 | Bacteroides xylanisolvens | 99.56 | 206 |
| FBI00208 | Anaerotruncus massiliensis | bacteria | firmicutes | 1673720 | Anaerotruncus colihominis | 96.52 | 208 |
| FBI00211 | Bacteroides vulgatus | bacteria | bacteroidetes | 821 | Bacteroides vulgatus | 99.78 | 211 |
| FBI00212 | Clostridium aldenense | bacteria | firmicutes | 358742 | Clostridium aldenense | 99.1 | 212 |
| FBI00217 | Alistipes shahii | bacteria | bacteroidetes | 328814 | Alistipes shahii | 98.77 | 217 |
| FBI00218 | Bacteroides uniformis | bacteria | bacteroidetes | 820 | Bacteroides uniformis | 99.42 | 218 |
| FBI00219 | Roseburia hominis | bacteria | firmicutes | 301301 | Roseburia hominis | 99.78 | 219 |
| FBI00229 | Alistipes senegalensis | bacteria | bacteroidetes | 1288121 | Alistipes senegalensis | 99.19 | 229 |
| FBI00232 | Bacteroides stercoris | bacteria | bacteroidetes | 46506 | Bacteroides stercoris | 98.84 | 232 |
| FBI00235 | Alistipes shahii | bacteria | bacteroidetes | 328814 | Alistipes shahii | 99.86 | 235 |
| FBI00238 | Alistipes sp. FBI00238 | bacteria | bacteroidetes | 239759 | Alistipes finegoldii | 95.84 | 238 |
| FBI00241 | Collinsella aerofaciens | bacteria | actinobacteria | 74426 | Collinsella aerofaciens | 99.34 | 241 |
| FBI00243 | Eubacterium siraeum | bacteria | firmicutes | 39492 | Eubacterium siraeum | 98.53 | 243 |
| FBI00244 | Faecalibacterium prausnitzii | bacteria | firmicutes | 853 | Faecalibacterium prausnitzii | 98.69 | 244 |
| FBI00245 | Acidaminococcus intestini | bacteria | firmicutes | 187327 | Acidaminococcus intestini | 99.72 | 245 |
| FBI00246 | Bifidobacterium longum | bacteria | actinobacteria | 216816 | Bifidobacterium longum | 99.7 | 246 |
| FBI00251 | Bifidobacterium | bacteria | actinobacteria | 28026 | Bifidobacterium | 99.85 | 251 |
| | pseudocatenulatum | | | | pseudocatenulatum | | |
| FBI00253 | Roseburia hominis | bacteria | firmicutes | 301301 | Roseburia hominis | 99.71 | 253 |
| FBI00254 | Eubacterium hallii | bacteria | firmicutes | 39488 | Eubacterium hallii | 99.08 | 254 |
| FBI00255 | Hungatella effluvii | bacteria | firmicutes | 1096246 | Hungatella hathewayi | 98.56 | 255 |
| FBI00257 | Eubacterium eligens | bacteria | firmicutes | 39485 | Eubacterium eligens | 99.28 | 257 |
| FBI00258 | Turicibacter sanguinis | bacteria | firmicutes | 154288 | Turicibacter sanguinis | 99.93 | 258 |
| FBI00259 | Dorea longicatena | bacteria | firmicutes | 88431 | Dorea longicatena | 99.7 | 259 |
| FBI00260 | Eubacterium rectale | bacteria | firmicutes | 39491 | Eubacterium rectale | 99.64 | 260 |
| FBI00262 | Bacteroides massiliensis | bacteria | bacteroidetes | 204516 | Bacteroides massiliensis | 99.71 | 262 |
| FBI00263 | Bacteroides caccae | bacteria | bacteroidetes | 47678 | Bacteroides caccae | 99.56 | 263 |
| FBI00265 | Bacteroides cellulosilyticus | bacteria | bacteroidetes | 246787 | Bacteroides cellulosilyticus | 99.21 | 265 |
| FBI00266 | Coprococcus eutactus | bacteria | firmicutes | 33043 | Coprococcus eutactus | 99.2 | 266 |
| FBI00267 | Anaerofustis stercorihominis | bacteria | firmicutes | 214853 | Anaerofustis stercorihominis | 97.29 | 267 |
| FBI00269 | Alistipes putredinis | bacteria | bacteroidetes | 28117 | Alistipes putredinis | 100 | 269 |
| FBI00271 | Bacteroides xylanisolvens | bacteria | bacteroidetes | 371601 | Bacteroides xylanisolvens | 98.42 | 271 |
| FBI00274 | Eubacterium xylanophilum | bacteria | firmicutes | 39497 | Eubacterium xylanophilum | 93.5 | 274 |
| FBI00275 | Holdemanella biformis | bacteria | firmicutes | 1735 | Holdemanella biformis | 98.99 | 275 |
| FBI00276 | Dorea formicigenerans | bacteria | firmicutes | 39486 | Dorea formicigenerans | 98.19 | 276 |
| FBI00277 | Alistipes onderdonkii | bacteria | bacteroidetes | 328813 | Alistipes onderdonkii | 99.63 | 277 |
| FBI00278 | Eubacterium ventriosum | bacteria | firmicutes | 39496 | Eubacterium ventriosum | 94.14 | 278 |
| FBI00283 | Ruminococcus bromii | bacteria | firmicutes | 40518 | Ruminococcus bromii | 96.02 | 283 |
| FBI00288 | Blautia hydrogenotrophica | bacteria | firmicutes | 53443 | Blautia hydrogenotrophica | 99.57 | 288 |
| FBI00289 | Oxalobacter formigenes | bacteria | proteobacteria | 847 | Oxalobacter formigenes | 99.21 | 289 |

TABLE 17

| | | | | | | % | |
|---|---|---|---|---|---|---|---|
| | | | | NCBI | | Match | SEQ ID |
| Strain # | Species ID | Kingdom | Phylum | Taxonomy ID | Closest 16S Species | (16S) | NO: X |
| FBI00001 | Clostridium citroniae | bacteria | firmicutes | 358743 | Clostridium citroniae | 99.64 | 1 |
| FBI00002 | Bacteroides salyersiae | bacteria | bacteroidetes | 291644 | Bacteroides salyersiae | 99.5 | 2 |
| FBI00004 | Neglecta timonensis | bacteria | firmicutes | 1776382 | Neglecta timonensis | 99.14 | 4 |
| FBI00011 | Bifidobacterium longum | bacteria | actinobacteria | 216816 | Bifidobacterium longum | 99.28 | 11 |
| FBI00013 | Parabacteroides merdae | bacteria | bacteroidetes | 46503 | Parabacteroides merdae | 99.5 | 13 |
| FBI00015 | Bacteroides uniformis | bacteria | bacteroidetes | 820 | Bacteroides uniformis | 99.78 | 15 |
| FBI00016 | Bifidobacterium | bacteria | actinobacteria | 28026 | Bifidobacterium | 99.64 | 16 |
| | pseudocatenulatum | | | | pseudocatenulatum | | |
| FBI00018 | Eubacterium rectale | bacteria | firmicutes | 39491 | Eubacterium rectale | 99.71 | 18 |
| FBI00020 | Bacteroides | bacteria | bacteroidetes | 818 | Bacteroides | 99.57 | 20 |
| | thetaiotaomicron | | | | thetaiotaomicron | | |
| FBI00029 | Parabacteroides | bacteria | bacteroidetes | 823 | Parabacteroides distasonis | 99.26 | 29 |
| | distasonis | | | | | | |
| FBI00030 | Eggerthella lenta | bacteria | firmicutes | 84112 | Eggerthella lenta | 98.47 | 30 |
| FBI00033 | Lachnospiraceae sp. | bacteria | firmicutes | 186803 | Clostridium amygdalinum | 93.56 | 33 |
| | FBI00033 | | | | | | |
| FBI00039 | Bacteroides vulgatus | bacteria | bacteroidetes | 821 | Bacteroides vulgatus | 99.71 | 39 |
| FBI00040 | Bilophila wadsworthia | bacteria | proteobacteria | 35833 | Desulfovibrio | 91.38 | 40 |
| | | | | | desulfuricans | | |
| FBI00043 | Bifidobacterium dentium | bacteria | actinobacteria | 1689 | Bifidobacterium dentium | 99.35 | 43 |
| FBI00046 | Bacteroides caccae | bacteria | bacteroidetes | 47678 | Bacteroides caccae | 99.71 | 46 |
| FBI00056 | Clostridium citroniae | bacteria | firmicutes | 358743 | Clostridium citroniae | 99.2 | 56 |
| FBI00057 | Dorea longicatena | bacteria | firmicutes | 88431 | Dorea longicatena | 99.7 | 57 |
| FBI00058 | Eubacterium rectale | bacteria | firmicutes | 39491 | Eubacterium rectale | 99.71 | 58 |
| FBI00060 | Bifidobacterium longum | bacteria | actinobacteria | 216816 | Bifidobacterium longum | 99.49 | 60 |
| FBI00062 | Collinsella aerofaciens | bacteria | actinobacteria | 74426 | Collinsella aerofaciens | 99.48 | 62 |
| FBI00064 | Dorea sp. FBI00064 | bacteria | firmicutes | 189330 | Ruminococcus gnavus | 95.58 | 64 |
| FBI00067 | Oxalobacter formigenes | bacteria | proteobacteria | 847 | Oxalobacter formigenes | 98.84 | 67 |
| FBI00068 | Akkermansia muciniphila | bacteria | verrucomicrobia | 239935 | Akkermansia muciniphila | 99.42 | 68 |
| FBI00069 | Ruminococcus bromii | bacteria | firmicutes | 40518 | Ruminococcus bromii | 98.84 | 69 |
| FBI00073 | Parabacteroides | bacteria | bacteroidetes | 823 | Parabacteroides distasonis | 98.99 | 73 |
| | distasonis | | | | | | |
| FBI00074 | Clostridium fessum | bacteria | firmicutes | 2126740 | Clostridium symbiosum | 94.03 | 74 |
| FBI00076 | Bacteroides | bacteria | bacteroidetes | 818 | Bacteroides | 99.78 | 76 |
| | thetaiotaomicron | | | | thetaiotaomicron | | |
| FBI00077 | Sutterella wadsworthensis | bacteria | proteobacteria | 40545 | Sutterella wadsworthensis | 99.86 | 77 |
| FBI00085 | Ruminococcus bromii | bacteria | firmicutes | 40518 | Ruminococcus bromii | 98.62 | 85 |
| FBI00086 | Ruminococcus bromii | bacteria | firmicutes | 40518 | Ruminococcus bromii | 98.77 | 86 |
| FBI00087 | Clostridium scindens | bacteria | firmicutes | 29347 | Clostridium scindens | 98.28 | 87 |
| FBI00091 | Eubacterium rectale | bacteria | firmicutes | 39491 | Eubacterium rectale | 99.86 | 91 |
| FBI00096 | Eggerthella lenta | bacteria | actinobacteria | 84112 | Eggerthella lenta | 98.76 | 96 |
| FBI00099 | Gordonibacter pamelaeae | bacteria | actinobacteria | 471189 | Gordonibacter pamelaeae | 99.56 | 99 |
| FBI00101 | Faecalibacterium | bacteria | firmicutes | 853 | Faecalibacterium | 97.97 | 101 |
| | prausnitzii | | | | prausnitzii | | |
| FBI00102 | Clostridium fessum | bacteria | firmicutes | 2126740 | Clostridium symbiosum | 94.31 | 102 |
| FBI00109 | Coprococcus comes | bacteria | firmicutes | 410072 | Coprococcus comes | 98.39 | 109 |
| FBI00111 | Bacteroides vulgatus | bacteria | bacteroidetes | 821 | Bacteroides vulgatus | 99.43 | 111 |
| FBI00112 | Bacteroides uniformis | bacteria | bacteroidetes | 820 | Bacteroides uniformis | 99.78 | 112 |
| FBI00113 | Parabacteroides merdae | bacteria | bacteroidetes | 46503 | Parabacteroides merdae | 99.79 | 113 |
| FBI00122 | Bacteroides uniformis | bacteria | bacteroidetes | 820 | Bacteroides uniformis | 99.57 | 122 |
| FBI00125 | Bacteroides stercoris | bacteria | bacteroidetes | 46506 | Bacteroides stercoris | 99.64 | 125 |
| FBI00126 | Bifidobacterium | bacteria | actinobacteria | 1680 | Bifidobacterium | 98.98 | 126 |
| | adolescentis | | | | adolescentis | | |
| FBI00127 | Collinsella aerofaciens | bacteria | actinobacteria | 74426 | Collinsella aerofaciens | 98.81 | 127 |
| FBI00130 | Coprococcus comes | bacteria | firmicutes | 410072 | Coprococcus comes | 99.35 | 130 |
| FBI00132 | Gordonibacter pamelaeae | bacteria | actinobacteria | 471189 | Gordonibacter pamelaeae | 99.48 | 132 |
| FBI00133 | Oxalobacter formigenes | bacteria | proteobacteria | 847 | Oxalobacter formigenes | 99.21 | 133 |
| FBI00135 | Bifidobacterium | bacteria | actinobacteria | 28026 | Bifidobacterium | 99.57 | 135 |
| | pseudocatenulatum | | | | pseudocatenulatum | | |
| FBI00137 | Bacteroides fragilis | bacteria | bacteroidetes | 817 | Bacteroides fragilis | 99.71 | 137 |
| FBI00139 | Bacteroides | bacteria | bacteroidetes | 818 | Bacteroides | 99.5 | 139 |
| | thetaiotaomicron | | | | thetaiotaomicron | | |
| FBI00142 | Clostridium fessum | bacteria | firmicutes | 2126740 | Clostridium symbiosum | 94.07 | 142 |
| FBI00143 | Parabacteroides merdae | bacteria | bacteroidetes | 46503 | Parabacteroides merdae | 99.07 | 143 |
| FBI00145 | Bifidobacterium | bacteria | actinobacteria | 1680 | Bifidobacterium | 99.14 | 145 |
| | adolescentis | | | | adolescentis | | |
| FBI00162 | Bifidobacterium | bacteria | actinobacteria | 1686 | Bifidobacterium | 99.14 | 162 |
| | catenulatum | | | | catenulatum | | |
| FBI00164 | Bacteroides stercoris | bacteria | bacteroidetes | 46506 | Bacteroides stercoris | 98.56 | 164 |
| FBI00165 | Bacteroides massiliensis | bacteria | bacteroidetes | 204516 | Bacteroides massiliensis | 99.71 | 165 |
| FBI00167 | Dorea longicatena | bacteria | firmicutes | 88431 | Dorea longicatena | 99.39 | 167 |
| FBI00168 | Collinsella aerofaciens | bacteria | actinobacteria | 74426 | Collinsella aerofaciens | 99.26 | 168 |
| FBI00169 | Parabacteroides | bacteria | bacteroidetes | 823 | Parabacteroides distasonis | 98.7 | 169 |
| | distasonis | | | | | | |
| FBI00170 | Eggerthella lenta | bacteria | actinobacteria | 84112 | Eggerthella lenta | 98.61 | 170 |
| FBI00171 | Bilophila wadsworthia | bacteria | proteobacteria | 35833 | Desulfovibrio | 91.45 | 171 |
| | | | | | desulfuricans | | |
| FBI00172 | Bifidobacterium longum | bacteria | actinobacteria | 216816 | Bifidobacterium longum | 99.05 | 172 |
| FBI00173 | Bacteroides vulgatus | bacteria | bacteroidetes | 821 | Bacteroides vulgatus | 100 | 173 |
| FBI00186 | Coprococcus comes | bacteria | firmicutes | 410072 | Coprococcus comes | 99.06 | 186 |
| FBI00192 | Sutterella wadsworthensis | bacteria | proteobacteria | 40545 | Sutterella wadsworthensis | 99.71 | 192 |
| FBI00197 | Bifidobacterium bifidum | bacteria | actinobacteria | 1681 | Bifidobacterium bifidum | 99.85 | 197 |
| FBI00201 | Eggerthella lenta | bacteria | actinobacteria | 84112 | Eggerthella lenta | 98.83 | 201 |
| FBI00208 | Anaerotruncus | bacteria | firmicutes | 1673720 | Anaerotruncus colihominis | 96.52 | 208 |
| | massiliensis | | | | | | |
| FBI00210 | Bifidobacterium bifidum | bacteria | actinobacteria | 1681 | Bifidobacterium bifidum | 99.93 | 210 |
| FBI00211 | Bacteroides vulgatus | bacteria | bacteroidetes | 821 | Bacteroides vulgatus | 99.78 | 211 |
| FBI00218 | Bacteroides uniforms | bacteria | bacteroidetes | 820 | Bacteroides uniformis | 99.42 | 218 |
| FBI00224 | Sutterella wadsworthensis | bacteria | proteobacteria | 40545 | Sutterella wadsworthensis | 99.71 | 224 |
| FBI00232 | Bacteroides stercoris | bacteria | bacteroidetes | 46506 | Bacteroides stercoris | 98.84 | 232 |
| FBI00233 | Ruminococcaceae sp. | bacteria | firmicutes | 474960 | Anaerotruncus colihominis | 91.63 | 233 |
| | FBI00233 | | | | | | |
| FBI00239 | Lactonifactor | bacteria | firmicutes | 341220 | Lactonifactor | 98.99 | 239 |
| | longoviformis | | | | longoviformis | | |
| FBI00241 | Collinsella aerofaciens | bacteria | actinobacteria | 74426 | Collinsella aerofaciens | 99.34 | 241 |
| FBI00243 | Eubacterium siraeum | bacteria | firmicutes | 39492 | Eubacterium siraeum | 98.53 | 243 |
| FBI00246 | Bifidobacterium longum | bacteria | actinobacteria | 216816 | Bifidobacterium longum | 99.7 | 246 |
| FBI00249 | Citrobacter portucalensis | bacteria | proteobacteria | 1639133 | Citrobacter freundii | 99.79 | 249 |
| FBI00251 | Bifidobacterium | bacteria | actinobacteria | 28026 | Bifidobacterium | 99.85 | 251 |
| | pseudocatenulatum | | | | pseudocatenulatum | | |
| FBI00259 | Dorea longicatena | bacteria | firmicutes | 88431 | Dorea longicatena | 99.7 | 259 |
| FBI00260 | Eubacterium rectale | bacteria | firmicutes | 39491 | Eubacterium rectale | 99.64 | 260 |
| FBI00262 | Bacteroides massiliensis | bacteria | bacteroidetes | 204516 | Bacteroides massiliensis | 99.71 | 262 |
| FBI00263 | Bacteroides caccae | bacteria | bacteroidetes | 47678 | Bacteroides caccae | 99.56 | 263 |
| FBI00265 | Bacteroides | bacteria | bacteroidetes | 246787 | Bacteroides | 99.21 | 265 |
| | cellulosilyticus | | | | cellulosilyticus | | |
| FBI00283 | Ruminococcus bromii | bacteria | firmicutes | 40518 | Ruminococcus bromii | 96.02 | 283 |
| FBI00289 | Oxalobacter formigenes | bacteria | proteobacteria | 847 | Oxalobacter formigenes | 99.21 | 289 |

TABLE 18

| | | | | | | % | |
|---|---|---|---|---|---|---|---|
| | | | | NCBI | | Match | SEQ ID |
| Strain # | Species ID | Kingdom | Phylum | Taxonomy ID | Closest 16S Species | (16S) | NO: X |
| FBI00001 | Clostridium citroniae | bacteria | firmicutes | 358743 | Clostridium citroniae | 99.64 | 1 |
| FBI00002 | Bacteroides salyersiae | bacteria | bacteroidetes | 291644 | Bacteroides salyersiae | 99.5 | 2 |
| FBI00004 | Neglecta timonensis | bacteria | firmicutes | 1776382 | Neglecta timonensis | 99.14 | 4 |
| FBI00010 | Blautia obeum | bacteria | firmicutes | 40520 | Blautia obeum | 98.12 | 10 |
| FBI00011 | Bifidobacterium longum | bacteria | actinobacteria | 216816 | Bifidobacterium longum | 99.28 | 11 |
| FBI00013 | Parabacteroides merdae | bacteria | bacteroidetes | 46503 | Parabacteroides merdae | 99.5 | 13 |
| FBI00016 | Bifidobacterium | bacteria | actinobacteria | 28026 | Bifidobacterium | 99.64 | 16 |
| | pseudocatenulatum | | | | pseudocatenulatum | | |
| FBI00017 | Blautia obeum | bacteria | firmicutes | 40520 | Blautia obeum | 98.34 | 17 |
| FBI00020 | Bacteroides thetaiotaomicron | bacteria | bacteroidetes | 818 | Bacteroides thetaiotaomicron | 99.57 | 20 |
| FBI00022 | Alistipes putredinis | bacteria | bacteroidetes | 28117 | Alistipes putredinis | 99.93 | 22 |
| FBI00030 | Eggerthella lenta | bacteria | firmicutes | 84112 | Eggerthella lenta | 98.47 | 30 |
| FBI00033 | Lachnospiraceae sp. | bacteria | firmicutes | 186803 | Clostridium amygdalinum | 93.56 | 33 |
| | FBI00033 | | | | | | |
| FBI00034 | Eubacterium eligens | bacteria | firmicutes | 39485 | Eubacterium eligens | 98.78 | 34 |
| FBI00038 | Coprococcus eutactus | bacteria | firmicutes | 33043 | Coprococcus eutactus | 95.96 | 38 |
| FBI00039 | Bacteroides vulgatus | bacteria | bacteroidetes | 821 | Bacteroides vulgatus | 99.71 | 39 |
| FBI00040 | Bilophila wadsworthia | bacteria | proteobacteria | 35833 | Desulfovibrio desulfuricans | 91.38 | 40 |
| FBI00042 | Bacteroides xylanisolvens | bacteria | bacteroidetes | 371601 | Bacteroides xylanisolvens | 99.71 | 42 |
| FBI00043 | Bifidobacterium dentium | bacteria | actinobacteria | 1689 | Bifidobacterium dentium | 99.35 | 43 |
| FBI00046 | Bacteroides caccae | bacteria | bacteroidetes | 47678 | Bacteroides caccae | 99.71 | 46 |
| FBI00047 | Eubacterium eligens | bacteria | firmicutes | 39485 | Eubacterium eligens | 98.79 | 47 |
| FBI00052 | Bacteroides xylanisolvens | bacteria | bacteroidetes | 371601 | Bacteroides xylanisolvens | 99.14 | 52 |
| FBI00056 | Clostridium citroniae | bacteria | firmicutes | 358743 | Clostridium citroniae | 99.2 | 56 |
| FBI00057 | Dorea longicatena | bacteria | firmicutes | 88431 | Dorea longicatena | 99.7 | 57 |
| FBI00060 | Bifidobacterium longum | bacteria | actinobacteria | 216816 | Bifidobacterium longum | 99.49 | 60 |
| FBI00062 | Collinsella aerofaciens | bacteria | actinobacteria | 74426 | Collinsella aerofaciens | 99.48 | 62 |
| FBI00067 | Oxalobacter formigenes | bacteria | proteobacteria | 847 | Oxalobacter formigenes | 98.84 | 67 |
| FBI00069 | Ruminococcus bromii | bacteria | firmicutes | 40518 | Ruminococcus bromii | 98.84 | 69 |
| FBI00072 | Coprococcus eutactus | bacteria | firmicutes | 33043 | Coprococcus eutactus | 96.17 | 72 |
| FBI00074 | Clostridium fessum | bacteria | firmicutes | 2126740 | Clostridium symbiosum | 94.03 | 74 |
| FBI00076 | Bacteroides thetaiotaomicron | bacteria | bacteroidetes | 818 | Bacteroides thetaiotaomicron | 99.78 | 76 |
| FBI00077 | Sutterella wadsworthensis | bacteria | proteobacteria | 40545 | Sutterella wadsworthensis | 99.86 | 77 |
| FBI00085 | Ruminococcus bromii | bacteria | firmicutes | 40518 | Ruminococcus bromii | 98.62 | 85 |
| FBI00086 | Ruminococcus bromii | bacteria | firmicutes | 40518 | Ruminococcus bromii | 98.77 | 86 |
| FBI00087 | Clostridium scindens | bacteria | firmicutes | 29347 | Clostridium scindens | 98.28 | 87 |
| FBI00090 | Eubacterium eligens | bacteria | firmicutes | 39485 | Eubacterium eligens | 98.71 | 90 |
| FBI00096 | Eggerthella lenta | bacteria | actinobacteria | 84112 | Eggerthella lenta | 98.76 | 96 |
| FBI00101 | Faecalibacterium prausnitzii | bacteria | firmicutes | 853 | Faecalibacterium prausnitzii | 97.97 | 101 |
| FBI00102 | Clostridium fessum | bacteria | firmicutes | 2126740 | Clostridium symbiosum | 94.31 | 102 |
| FBI00109 | Coprococcus comes | bacteria | firmicutes | 410072 | Coprococcus comes | 98.39 | 109 |
| FBI00111 | Bacteroides vulgatus | bacteria | bacteroidetes | 821 | Bacteroides vulgatus | 99.43 | 111 |
| FBI00112 | Bacteroides uniformis | bacteria | bacteroidetes | 820 | Bacteroides uniformis | 99.78 | 112 |
| FBI00113 | Parabacteroides merdae | bacteria | bacteroidetes | 46503 | Parabacteroides merdae | 99.79 | 113 |
| FBI00115 | Dorea formicigenerans | bacteria | firmicutes | 39486 | Dorea formicigenerans | 97.98 | 115 |
| FBI00120 | Hungatella effluvii | bacteria | firmicutes | 154046 | Hungatella hathewayi | 98.78 | 120 |
| FBI00122 | Bacteroides uniformis | bacteria | bacteroidetes | 820 | Bacteroides uniformis | 99.57 | 122 |
| FBI00125 | Bacteroides stercoris | bacteria | bacteroidetes | 46506 | Bacteroides stercoris | 99.64 | 125 |
| FBI00127 | Collinsella aerofaciens | bacteria | actinobacteria | 74426 | Collinsella aerofaciens | 98.81 | 127 |
| FBI00133 | Oxalobacter formigenes | bacteria | proteobacteria | 847 | Oxalobacter formigenes | 99.21 | 133 |
| FBI00135 | Bifidobacterium | bacteria | actinobacteria | 28026 | Bifidobacterium | 99.57 | 135 |
| | pseudocatenulatum | | | | pseudocatenulatum | | |
| FBI00137 | Bacteroides fragilis | bacteria | bacteroidetes | 817 | Bacteroides fragilis | 99.71 | 137 |
| FBI00139 | Bacteroides thetaiotaomicron | bacteria | bacteroidetes | 818 | Bacteroides thetaiotaomicron | 99.5 | 139 |
| FBI00142 | Clostridium fessum | bacteria | firmicutes | 2126740 | Clostridium symbiosum | 94.07 | 142 |
| FBI00143 | Parabacteroides merdae | bacteria | bacteroidetes | 46503 | Parabacteroides merdae | 99.07 | 143 |
| FBI00147 | Clostridium bolteae | bacteria | firmicutes | 208479 | Clostridium bolteae | 99.28 | 147 |
| FBI00162 | Bifidobacterium catenulatum | bacteria | actinobacteria | 1686 | Bifidobacterium catenulatum | 99.14 | 162 |
| FBI00164 | Bacteroides stercoris | bacteria | bacteroidetes | 46506 | Bacteroides stercoris | 98.56 | 164 |
| FBI00167 | Dorea longicatena | bacteria | firmicutes | 88431 | Dorea longicatena | 99.39 | 167 |
| FBI00168 | Collinsella aerofaciens | bacteria | actinobacteria | 74426 | Collinsella aerofaciens | 99.26 | 168 |
| FBI00170 | Eggerthella lenta | bacteria | actinobacteria | 84112 | Eggerthella lenta | 98.61 | 170 |
| FBI00171 | Bilophila wadsworthia | bacteria | proteobacteria | 35833 | Desulfovibrio desulfuricans | 91.45 | 171 |
| FBI00172 | Bifidobacterium longum | bacteria | actinobacteria | 216816 | Bifidobacterium longum | 99.05 | 172 |
| FBI00173 | Bacteroides vulgatus | bacteria | bacteroidetes | 821 | Bacteroides vulgatus | 100 | 173 |
| FBI00182 | Bacteroides coprocola | bacteria | bacteroidetes | 310298 | Bacteroides coprocola | 99.64 | 182 |
| FBI00197 | Bifidobacterium bifidum | bacteria | actinobacteria | 1681 | Bifidobacterium bifidum | 99.85 | 197 |
| FBI00199 | Clostridium bolteae | bacteria | firmicutes | 208479 | Clostridium bolteae | 99.28 | 199 |
| FBI00201 | Eggerthella lenta | bacteria | actinobacteria | 84112 | Eggerthella lenta | 98.83 | 201 |
| FBI00206 | Bacteroides xylanisolvens | bacteria | bacteroidetes | 371601 | Bacteroides xylanisolvens | 99.56 | 206 |
| FBI00208 | Anaerotruncus massiliensis | bacteria | firmicutes | 1673720 | Anaerotruncus colihominis | 96.52 | 208 |
| FBI00210 | Bifidobacterium bifidum | bacteria | actinobacteria | 1681 | Bifidobacterium bifidum | 99.93 | 210 |
| FBI00211 | Bacteroides vulgatus | bacteria | bacteroidetes | 821 | Bacteroides vulgatus | 99.78 | 211 |
| FBI00232 | Bacteroides stercoris | bacteria | bacteroidetes | 46506 | Bacteroides stercoris | 98.84 | 232 |
| FBI00238 | Alistipes sp. FBI00238 | bacteria | bacteroidetes | 239759 | Alistipes finegoldii | 95.84 | 238 |
| FBI00241 | Collinsella aerofaciens | bacteria | actinobacteria | 74426 | Collinsella aerofaciens | 99.34 | 241 |
| FBI00243 | Eubacterium siraeum | bacteria | firmicutes | 39492 | Eubacterium siraeum | 98.53 | 243 |
| FBI00244 | Faecalibacterium prausnitzii | bacteria | firmicutes | 853 | Faecalibacterium prausnitzii | 98.69 | 244 |
| FBI00246 | Bifidobacterium longum | bacteria | actinobacteria | 216816 | Bifidobacterium longum | 99.7 | 246 |
| FBI00251 | Bifidobacterium | bacteria | actinobacteria | 28026 | Bifidobacterium | 99.85 | 251 |
| | pseudocatenulatum | | | | pseudocatenulatum | | |
| FBI00254 | Eubacterium hallii | bacteria | firmicutes | 39488 | Eubacterium hallii | 99.08 | 254 |
| FBI00255 | Hungatella effluvii | bacteria | firmicutes | 1096246 | Hungatella hathewayi | 98.56 | 255 |
| FBI00257 | Eubacterium eligens | bacteria | firmicutes | 39485 | Eubacterium eligens | 99.28 | 257 |
| FBI00260 | Eubacterium rectale | bacteria | firmicutes | 39491 | Eubacterium rectale | 99.64 | 260 |
| FBI00265 | Bacteroides cellulosilyticus | bacteria | bacteroidetes | 246787 | Bacteroides cellulosilyticus | 99.21 | 265 |
| FBI00266 | Coprococcus eutactus | bacteria | firmicutes | 33043 | Coprococcus eutactus | 99.2 | 266 |
| FBI00269 | Alistipes putredinis | bacteria | bacteroidetes | 28117 | Alistipes putredinis | 100 | 269 |
| FBI00271 | Bacteroides xylanisolvens | bacteria | bacteroidetes | 371601 | Bacteroides xylanisolvens | 98.42 | 271 |
| FBI00278 | Eubacterium ventriosum | bacteria | firmicutes | 39496 | Eubacterium ventriosum | 94.14 | 278 |
| FBI00283 | Ruminococcus bromii | bacteria | firmicutes | 40518 | Ruminococcus bromii | 96.02 | 283 |
| FBI00288 | Blautia hydrogenotrophica | bacteria | firmicutes | 53443 | Blautia hydrogenotrophica | 99.57 | 288 |
| FBI00289 | Oxalobacter formigenes | bacteria | proteobacteria | 847 | Oxalobacter formigenes | 99.21 | 289 |

TABLE 19

| | | | | | | % | |
|---|---|---|---|---|---|---|---|
| | | | | NCBI | | Match | SEQ ID |
| Strain # | Species ID | Kingdom | Phylum | Taxonomy ID | Closest 16S Species | (16S) | NO: X |
| FBI00001 | Clostridium citroniae | bacteria | firmicutes | 358743 | Clostridium citroniae | 99.64 | 1 |
| FBI00002 | Bacteroides salyersiae | bacteria | bacteroidetes | 291644 | Bacteroides salyersiae | 99.5 | 2 |
| FBI00003 | Enterococcus faecalis | bacteria | firmicutes | 1351 | Enterococcus faecalis | 99.93 | 3 |
| FBI00004 | Neglecta timonensis | bacteria | firmicutes | 1776382 | Neglecta timonensis | 99.14 | 4 |
| FBI00005 | Enterococcus casseliflavus | bacteria | firmicutes | 37734 | Enterococcus gallinarum | 99.65 | 5 |
| FBI00006 | Enterobacter himalayensis | bacteria | proteobacteria | 547 | Enterobacter | 99 | 6 |
| | | | | | hormaechei | | |
| FBI00009 | Bifidobacterium adolescentis | bacteria | actinobacteria | 1680 | Bifidobacterium faecale | 98.6 | 9 |
| FBI00010 | Blautia obeum | bacteria | firmicutes | 40520 | Blautia obeum | 98.12 | 10 |
| FBI00011 | Bifidobacterium longum | bacteria | actinobacteria | 216816 | Bifidobacterium longum | 99.28 | 11 |
| FBI00012 | Alistipes onderdonkii | bacteria | bacteroidetes | 328813 | Alistipes onderdonkii | 99.71 | 12 |
| FBI00013 | Parabacteroides merdae | bacteria | bacteroidetes | 46503 | Parabacteroides merdae | 99.5 | 13 |
| FBI00015 | Bacteroides uniformis | bacteria | bacteroidetes | 820 | Bacteroides uniformis | 99.78 | 15 |
| FBI00016 | Bifidobacterium | bacteria | actinobacteria | 28026 | Bifidobacterium | 99.64 | 16 |
| | pseudocatenulatum | | | | pseudocatenulatum | | |
| FBI00017 | Blautia obeum | bacteria | firmicutes | 40520 | Blautia obeum | 98.34 | 17 |
| FBI00018 | Eubacterium rectale | bacteria | firmicutes | 39491 | Eubacterium rectale | 99.71 | 18 |
| FBI00019 | Alistipes timonensis | bacteria | bacteroidetes | 1465754 | Alistipes timonensis | 99.78 | 19 |
| FBI00020 | Bacteroides thetaiotaomicron | bacteria | bacteroidetes | 818 | Bacteroides | 99.57 | 20 |
| | | | | | thetaiotaomicron | | |
| FBI00021 | Bacteroides kribbi/ | bacteria | bacteroidetes | 816 | Bacteroides kribbi | 99.07 | 21 |
| | Bacteroides koreensis | | | | | | |
| | species cluster | | | | | | |
| FBI00022 | Alistipes putredinis | bacteria | bacteroidetes | 28117 | Alistipes putredinis | 99.93 | 22 |
| FBI00025 | Coprococcus comes | bacteria | firmicutes | 410072 | Coprococcus comes | 99.21 | 25 |
| FBI00027 | Fusicatenibacter saccharivorans | bacteria | firmicutes | 1150298 | Fusicatenibacter | 97.6 | 27 |
| | | | | | saccharivorans | | |
| FBI00029 | Parabacteroides distasonis | bacteria | bacteroidetes | 823 | Parabacteroides | 99.26 | 29 |
| | | | | | distasonis | | |
| FBI00030 | Eggerthella lenta | bacteria | firmicutes | 84112 | Eggerthella lenta | 98.47 | 30 |
| FBI00031 | Enterobacter hormaechei | bacteria | proteobacteria | 158836 | Enterobacter | 99.43 | 31 |
| | | | | | hormaechei | | |
| FBI00033 | Lachnospiraceae sp. FBI00033 | bacteria | firmicutes | 186803 | Clostridium | 93.56 | 33 |
| | | | | | amygdalinum | | |
| FBI00034 | Eubacterium eligens | bacteria | firmicutes | 39485 | Eubacterium eligens | 98.78 | 34 |
| FBI00036 | Blautia faecis | bacteria | firmicutes | 871665 | Blautia faecis | 99.53 | 36 |
| FBI00038 | Coprococcus eutactus | bacteria | firmicutes | 33043 | Coprococcus eutactus | 95.96 | 38 |
| FBI00040 | Bilophila wadsworthia | bacteria | proteobacteria | 35833 | Desulfovibrio | 91.38 | 40 |
| | | | | | desulfuricans | | |
| FBI00041 | Phascolarctobacterium faecium | bacteria | firmicutes | 33025 | Phascolarctobacterium | 99.23 | 41 |
| | | | | | faecium | | |
| FBI00043 | Bifidobacterium dentium | bacteria | actinobacteria | 1689 | Bifidobacterium | 99.35 | 43 |
| | | | | | dentium | | |
| FBI00044 | Blautia wexlerae | bacteria | firmicutes | 418240 | Blautia wexlerae | 98.69 | 44 |
| FBI00046 | Bacteroides caccae | bacteria | bacteroidetes | 47678 | Bacteroides caccae | 99.71 | 46 |
| FBI00047 | Eubacterium eligens | bacteria | firmicutes | 39485 | Eubacterium eligens | 98.79 | 47 |
| FBI00048 | Fusicatenibacter saccharivorans | bacteria | firmicutes | 1150298 | Fusicatenibacter | 97.95 | 48 |
| | | | | | saccharivorans | | |
| FBI00049 | Dialister succinatiphilus | bacteria | firmicutes | 487173 | Dialister succinatiphilus | 95.74 | 49 |
| FBI00050 | Bacteroides nordii | bacteria | bacteroidetes | 291645 | Bacteroides nordii | 98.63 | 50 |
| FBI00051 | Dorea formicigenerans | bacteria | firmicutes | 39486 | Dorea formicigenerans | 98.07 | 51 |
| FBI00052 | Bacteroides xylanisolvens | bacteria | bacteroidetes | 371601 | Bacteroides | 99.14 | 52 |
| | | | | | xylanisolvens | | |
| FBI00053 | Lactobacillus rogosae | bacteria | firmicutes | 706562 | Lachnospira | 97.36 | 53 |
| | | | | | pectinoschiza | | |
| FBI00055 | Bacteroides kribbi/ | bacteria | bacteroidetes | 816 | Bacteroides kribbi | 99.64 | 55 |
| | Bacteroides koreensis | | | | | | |
| | species cluster | | | | | | |
| FBI00056 | Clostridium citroniae | bacteria | firmicutes | 358743 | Clostridium citroniae | 99.2 | 56 |
| FBI00057 | Dorea longicatena | bacteria | firmicutes | 88431 | Dorea longicatena | 99.7 | 57 |
| FBI00058 | Eubacterium rectale | bacteria | firmicutes | 39491 | Eubacterium rectale | 99.71 | 58 |
| FBI00060 | Bifidobacterium longum | bacteria | actinobacteria | 216816 | Bifidobacterium longum | 99.49 | 60 |
| FBI00061 | Alistipes shahii | bacteria | bacteroidetes | 328814 | Alistipes shahii | 99.19 | 61 |
| FBI00062 | Collinsella aerofaciens | bacteria | actinobacteria | 74426 | Collinsella aerofaciens | 99.48 | 62 |
| FBI00066 | Parasutterella excrementihominis | bacteria | proteobacteria | 487175 | Parasutterella | 99.13 | 66 |
| | | | | | excrementihominis | | |
| FBI00067 | Oxalobacter formigenes | bacteria | proteobacteria | 847 | Oxalobacter formigenes | 98.84 | 67 |
| FBI00068 | Akkermansia muciniphila | bacteria | verrucomicrobia | 239935 | Akkermansia | 99.42 | 68 |
| | | | | | muciniphila | | |
| FBI00069 | Ruminococcus bromii | bacteria | firmicutes | 40518 | Ruminococcus bromii | 98.84 | 69 |
| FBI00070 | Bacteroides kribbi/ | bacteria | bacteroidetes | 816 | Bacteroides koreensis | 99.71 | 70 |
| | Bacteroides koreensis | | | | | | |
| | species cluster | | | | | | |
| FBI00073 | Parabacteroides distasonis | bacteria | bacteroidetes | 823 | Parabacteroides | 98.99 | 73 |
| | | | | | distasonis | | |
| FBI00075 | Paraprevotella clara | bacteria | bacteroidetes | 454154 | Paraprevotella clara | 98.85 | 75 |
| FBI00076 | Bacteroides thetaiotaomicron | bacteria | bacteroidetes | 818 | Bacteroides | 99.78 | 76 |
| | | | | | thetaiotaomicron | | |
| FBI00077 | Sutterella wadsworthensis | bacteria | proteobacteria | 40545 | Sutterella | 99.86 | 77 |
| | | | | | wadsworthensis | | |
| FBI00080 | Sutterella massiliensis | bacteria | proteobacteria | 1816689 | Sutterella massiliensis | 99.78 | 80 |
| FBI00085 | Ruminococcus bromii | bacteria | firmicutes | 40518 | Ruminococcus bromii | 98.62 | 85 |
| FBI00087 | Clostridium scindens | bacteria | firmicutes | 29347 | Clostridium scindens | 98.28 | 87 |
| FBI00092 | Monoglobus pectinilyticus | bacteria | firmicutes | 1981510 | Monoglobus | 99.5 | 92 |
| | | | | | pectinilyticus | | |
| FBI00093 | Roseburia hominis | bacteria | firmicutes | 301301 | Roseburia hominis | 99.71 | 93 |
| FBI00098 | Bacteroides dorei | bacteria | bacteroidetes | 357276 | Bacteroides dorei | 99.93 | 98 |
| FBI00101 | Faecalibacterium prausnitzii | bacteria | firmicutes | 853 | Faecalibacterium | 97.97 | 101 |
| | | | | | prausnitzii | | |
| FBI00102 | Clostridium fessum | bacteria | firmicutes | 2126740 | Clostridium symbiosum | 94.31 | 102 |
| FBI00104 | Blautia wexlerae | bacteria | firmicutes | 418240 | Blautia luti | 97.18 | 104 |
| FBI00110 | Lachnoclostridium pacaense | bacteria | firmicutes | 1917870 | Lachnoclostridium | 98.92 | 110 |
| | | | | | pacaense | | |
| FBI00111 | Bacteroides vulgatus | bacteria | bacteroidetes | 821 | Bacteroides vulgatus | 99.43 | 111 |
| FBI00116 | Ruminococcus faecis | bacteria | firmicutes | 592978 | Ruminococcus faecis | 99.57 | 116 |
| FBI00117 | Blautia faecis | bacteria | firmicutes | 871665 | Blautia faecis | 99.52 | 117 |
| FBI00132 | Gordonibacter pamelaeae | bacteria | actinobacteria | 471189 | Gordonibacter | 99.48 | 132 |
| | | | | | pamelaeae | | |
| FBI00133 | Oxalobacter formigenes | bacteria | proteobacteria | 847 | Oxalobacter formigenes | 99.21 | 133 |
| FBI00140 | Phascolarctobacterium faecium | bacteria | firmicutes | 33025 | Phascolarctobacterium | 99.58 | 140 |
| | | | | | faecium | | |
| FBI00141 | Phascolarctobacterium faecium | bacteria | firmicutes | 33025 | Phascolarctobacterium | 99.15 | 141 |
| | | | | | faecium | | |
| FBI00155 | Blautia obeum | bacteria | firmicutes | 40520 | Blautia obeum | 98.7 | 155 |
| FBI00289 | Oxalobacter formigenes | bacteria | proteobacteria | 847 | Oxalobacter formigenes | 99.21 | 289 |

TABLE 20

| | | | | | | % | |
|---|---|---|---|---|---|---|---|
| | | | | NCBI | | Match | SEQ ID |
| Strain # | Species ID | Kingdom | Phylum | Taxonomy ID | Closest 16S Species | (16S) | NO: X |
| FBI00001 | Clostridium citroniae | bacteria | firmicutes | 358743 | Clostridium citroniae | 99.64 | 1 |
| FBI00002 | Bacteroides salyersiae | bacteria | bacteroidetes | 291644 | Bacteroides salyersiae | 99.5 | 2 |
| FBI00004 | Neglecta timonensis | bacteria | firmicutes | 1776382 | Neglecta timonensis | 99.14 | 4 |
| FBI00009 | Bifidobacterium adolescentis | bacteria | actinobacteria | 1680 | Bifidobacterium faecale | 98.6 | 9 |
| FBI00010 | Blautia obeum | bacteria | firmicutes | 40520 | Blautia obeum | 98.12 | 10 |
| FBI00011 | Bifidobacterium longum | bacteria | actinobacteria | 216816 | Bifidobacterium longum | 99.28 | 11 |
| FBI00012 | Alistipes onderdonkii | bacteria | bacteroidetes | 328813 | Alistipes onderdonkii | 99.71 | 12 |
| FBI00013 | Parabacteroides merdae | bacteria | bacteroidetes | 46503 | Parabacteroides merdae | 99.5 | 13 |
| FBI00015 | Bacteroides uniformis | bacteria | bacteroidetes | 820 | Bacteroides uniformis | 99.78 | 15 |
| FBI00016 | Bifidobacterium | bacteria | actinobacteria | 28026 | Bifidobacterium | 99.64 | 16 |
| | pseudocatenulatum | | | | pseudocatenulatum | | |
| FBI00018 | Eubacterium rectale | bacteria | firmicutes | 39491 | Eubacterium rectale | 99.71 | 18 |
| FBI00019 | Alistipes timonensis | bacteria | bacteroidetes | 1465754 | Alistipes timonensis | 99.78 | 19 |
| FBI00020 | Bacteroides thetaiotaomicron | bacteria | bacteroidetes | 818 | Bacteroides | 99.57 | 20 |
| | | | | | thetaiotaomicron | | |
| FBI00021 | Bacteroides kribbi/ | bacteria | bacteroidetes | 816 | Bacteroides kribbi | 99.07 | 21 |
| | Bacteroides koreensis | | | | | | |
| | species cluster | | | | | | |
| FBI00022 | Alistipes putredinis | bacteria | bacteroidetes | 28117 | Alistipes putredinis | 99.93 | 22 |
| FBI00025 | Coprococcus comes | bacteria | firmicutes | 410072 | Coprococcus comes | 99.21 | 25 |
| FBI00027 | Fusicatenibacter saccharivorans | bacteria | firmicutes | 1150298 | Fusicatenibacter | 97.6 | 27 |
| | | | | | saccharivorans | | |
| FBI00029 | Parabacteroides distasonis | bacteria | bacteroidetes | 823 | Parabacteroides | 99.26 | 29 |
| | | | | | distasonis | | |
| FBI00030 | Eggerthella lenta | bacteria | firmicutes | 84112 | Eggerthella lenta | 98.47 | 30 |
| FBI00032 | Anaerostipes hadrus | bacteria | firmicutes | 649756 | Anaerostipes hadrus | 99.64 | 32 |
| FBI00033 | Lachnospiraceae sp. FBI00033 | bacteria | firmicutes | 186803 | Clostridium | 93.56 | 33 |
| | | | | | amygdalinum | | |
| FBI00034 | Eubacterium eligens | bacteria | firmicutes | 39485 | Eubacterium eligens | 98.78 | 34 |
| FBI00036 | Blautia faecis | bacteria | firmicutes | 871665 | Blautia faecis | 99.53 | 36 |
| FBI00038 | Coprococcus eutactus | bacteria | firmicutes | 33043 | Coprococcus eutactus | 95.96 | 38 |
| FBI00040 | Bilophila wadsworthia | bacteria | proteobacteria | 35833 | Desulfovibrio | 91.38 | 40 |
| | | | | | desulfuricans | | |
| FBI00043 | Bifidobacterium dentium | bacteria | actinobacteria | 1689 | Bifidobacterium dentium | 99.35 | 43 |
| FBI00044 | Blautia wexlerae | bacteria | firmicutes | 418240 | Blautia wexlerae | 98.69 | 44 |
| FBI00046 | Bacteroides caccae | bacteria | bacteroidetes | 47678 | Bacteroides caccae | 99.71 | 46 |
| FBI00047 | Eubacterium eligens | bacteria | firmicutes | 39485 | Eubacterium eligens | 98.79 | 47 |
| FBI00048 | Fusicatenibacter saccharivorans | bacteria | firmicutes | 1150298 | Fusicatenibacter | 97.95 | 48 |
| | | | | | saccharivorans | | |
| FBI00049 | Dialister succinatiphilus | bacteria | firmicutes | 487173 | Dialister succinatiphilus | 95.74 | 49 |
| FBI00050 | Bacteroides nordii | bacteria | bacteroidetes | 291645 | Bacteroides nordii | 98.63 | 50 |
| FBI00051 | Dorea formicigenerans | bacteria | firmicutes | 39486 | Dorea formicigenerans | 98.07 | 51 |
| FBI00052 | Bacteroides xylanisolvens | bacteria | bacteroidetes | 371601 | Bacteroides | 99.14 | 52 |
| | | | | | xylanisolvens | | |
| FBI00053 | Lactobacillus rogosae | bacteria | firmicutes | 706562 | Lachnospira | 97.36 | 53 |
| | | | | | pectinoschiza | | |
| FBI00055 | Bacteroides kribbi/ | bacteria | bacteroidetes | 816 | Bacteroides kribbi | 99.64 | 55 |
| | Bacteroides koreensis | | | | | | |
| | species cluster | | | | | | |
| FBI00056 | Clostridium citroniae | bacteria | firmicutes | 358743 | Clostridium citroniae | 99.2 | 56 |
| FBI00057 | Dorea longicatena | bacteria | firmicutes | 88431 | Dorea longicatena | 99.7 | 57 |
| FBI00059 | Bacteroides stercorirosoris | bacteria | bacteroidetes | 871324 | Bacteroides oleiciplenus | 98.81 | 59 |
| FBI00060 | Bifidobacterium longum | bacteria | actinobacteria | 216816 | Bifidobacterium longum | 99.49 | 60 |
| FBI00061 | Alistipes shahii | bacteria | bacteroidetes | 328814 | Alistipes shahii | 99.19 | 61 |
| FBI00062 | Collinsella aerofaciens | bacteria | actinobacteria | 74426 | Collinsella aerofaciens | 99.48 | 62 |
| FBI00066 | Parasutterella excrementihominis | bacteria | proteobacteria | 487175 | Parasutterella | 99.13 | 66 |
| | | | | | excrementihominis | | |
| FBI00067 | Oxalobacter formigenes | bacteria | proteobacteria | 847 | Oxalobacter formigenes | 98.84 | 67 |
| FBI00068 | Akkemiansia muciniphila | bacteria | verrucomicrobia | 239935 | Akkermansia | 99.42 | 68 |
| | | | | | muciniphila | | |
| FBI00069 | Ruminococcus bromii | bacteria | firmicutes | 40518 | Ruminococcus bromii | 98.84 | 69 |
| FBI00070 | Bacteroides kribbi/ | bacteria | bacteroidetes | 816 | Bacteroides koreensis | 99.71 | 70 |
| | Bacteroides koreensis | | | | | | |
| | species cluster | | | | | | |
| FBI00071 | Lachnospiraceae sp. FBI00071 | bacteria | firmicutes | 186803 | Roseburia faecis | 94.92 | 71 |
| FBI00072 | Coprococcus eutactus | bacteria | firmicutes | 33043 | Coprococcus eutactus | 96.17 | 72 |
| FBI00074 | Clostridium fessum | bacteria | firmicutes | 2126740 | Clostridium symbiosum | 94.03 | 74 |
| FBI00075 | Paraprevotella clara | bacteria | bacteroidetes | 454154 | Paraprevotella clara | 98.85 | 75 |
| FBI00076 | Bacteroides thetaiotaomicron | bacteria | bacteroidetes | 818 | Bacteroides | 99.78 | 76 |
| | | | | | thetaiotaomicron | | |
| FBI00077 | Sutterella wadsworthensis | bacteria | proteobacteria | 40545 | Sutterella | 99.86 | 77 |
| | | | | | wadsworthensis | | |
| FBI00078 | Blautia obeum | bacteria | firmicutes | 40520 | Blautia obeum | 98.34 | 78 |
| FBI00079 | Clostridium clostridioforme | bacteria | firmicutes | 1531 | Clostridium | 99.14 | 79 |
| | | | | | clostridioforme | | |
| FBI00080 | Sutterella massiliensis | bacteria | proteobacteria | 1816689 | Sutterella massiliensis | 99.78 | 80 |
| FBI00081 | Porphyromonas asaccharolytica | bacteria | bacteroidetes | 28123 | Porphyromonas | 99.35 | 81 |
| | | | | | asaccharolytica | | |
| FBI00082 | Ruminococcaceae sp. FBI00082 | bacteria | firmicutes | 541000 | Phocea massiliensis | 93.08 | 82 |
| | FBI00097 | | | | | | |
| FBI00085 | Ruminococcus bromii | bacteria | firmicutes | 40518 | Ruminococcus bromii | 98.62 | 85 |
| FBI00087 | Clostridium scindens | bacteria | firmicutes | 29347 | Clostridium scindens | 98.28 | 87 |
| FBI00092 | Monoglobus pectinilyticus | bacteria | firmicutes | 1981510 | Monoglobus | 99.5 | 92 |
| | | | | | pectinilyticus | | |
| FBI00093 | Roseburia hominis | bacteria | firmicutes | 301301 | Roseburia hominis | 99.71 | 93 |
| FBI00096 | Eggerthella lenta | bacteria | actinobacteria | 84112 | Eggerthella lenta | 98.76 | 96 |
| FBI00097 | Ruminococcaceae sp. FBI00082 | bacteria | firmicutes | 541000 | Phocea massiliensis | 93.07 | 97 |
| | FBI00097 | | | | | | |
| FBI00099 | Gordonibacter pamelaeae | bacteria | actinobacteria | 471189 | Gordonibacter | 99.56 | 99 |
| | | | | | pamelaeae | | |
| FBI00101 | Faecalibacterium prausnitzii | bacteria | firmicutes | 853 | Faecalibacterium | 97.97 | 101 |
| | | | | | prausnitzii | | |
| FBI00102 | Clostridium fessum | bacteria | firmicutes | 2126740 | Clostridium symbiosum | 94.31 | 102 |
| FBI00104 | Blautia wexlerae | bacteria | firmicutes | 418240 | Blautia luti | 97.18 | 104 |
| FBI00109 | Coprococcus comes | bacteria | firmicutes | 410072 | Coprococcus comes | 98.39 | 109 |
| FBI00110 | Lachnoclostridium pacacnse | bacteria | firmicutes | 1917870 | Lachnoclostridium | 98.92 | 110 |
| | | | | | pacaense | | |
| FBI00111 | Bacteroides vulgatus | bacteria | bacteroidetes | 821 | Bacteroides vulgatus | 99.43 | 111 |
| FBI00112 | Bacteroides uniformis | bacteria | bacteroidetes | 820 | Bacteroides uniformis | 99.78 | 112 |
| FBI00113 | Parabacteroides merdae | bacteria | bacteroidetes | 46503 | Parabacteroides merdae | 99.79 | 113 |
| FBI00115 | Dorea formicigenerans | bacteria | firmicutes | 39486 | Dorea formicigenerans | 97.98 | 115 |
| FBI00116 | Ruminococcus faecis | bacteria | firmicutes | 592978 | Ruminococcus faecis | 99.57 | 116 |
| FBI00117 | Blautia faecis | bacteria | firmicutes | 871665 | Blautia faecis | 99.52 | 117 |
| FBI00120 | Hungatella effluvii | bacteria | firmicutes | 154046 | Hungatella hathewayi | 98.78 | 120 |
| FBI00123 | Roseburia hominis | bacteria | firmicutes | 301301 | Roseburia hominis | 100 | 123 |
| FBI00124 | Anaerostipes hadrus | bacteria | firmicutes | 649756 | Anaerostipes hadrus | 99.86 | 124 |
| FBI00125 | Bacteroides stercoris | bacteria | bacteroidetes | 46506 | Bacteroides stercoris | 99.64 | 125 |
| FBI00126 | Bifidobacterium adolescentis | bacteria | actinobacteria | 1680 | Bifidobacterium | 98.98 | 126 |
| | | | | | adolescentis | | |
| FBI00127 | Collinsella aerofaciens | bacteria | actinobacteria | 74426 | Collinsella aerofaciens | 98.81 | 127 |
| FBI00128 | Hungatella effluvii | bacteria | firmicutes | 1096246 | Hungatella effluvii | 98.71 | 128 |
| FBI00132 | Gordonibacter pamelaeae | bacteria | actinobacteria | 471189 | Gordonibacter | 99.48 | 132 |
| | | | | | pamelaeae | | |
| FBI00133 | Oxalobacter formigenes | bacteria | proteobacteria | 847 | Oxalobacter formigenes | 99.21 | 133 |
| FBI00135 | Bifidobacterium | bacteria | actinobacteria | 28026 | Bifidobacterium | 99.57 | 135 |
| | pseudocatenulatum | | | | pseudocatenulatum | | |
| FBI00137 | Bacteroides fragilis | bacteria | bacteroidetes | 817 | Bacteroides fragilis | 99.71 | 137 |
| FBI00140 | Phascolarctobacterium faecium | bacteria | firmicutes | 33025 | Phascolarctobacterium | 99.58 | 140 |
| | | | | | faecium | | |
| FBI00141 | Phascolarctobacterium faecium | bacteria | firmicutes | 33025 | Phascolarctobacterium | 99.15 | 141 |
| | | | | | faecium | | |
| FBI00145 | Bifidobacterium adolescentis | bacteria | actinobacteria | 1680 | Bifidobacterium | 99.14 | 145 |
| | | | | | adolescentis | | |
| FBI00147 | Clostridium bolteae | bacteria | firmicutes | 208479 | Clostridium bolteae | 99.28 | 147 |
| FBI00149 | Monoglobus pectinilyticus | bacteria | firmicutes | 1981510 | Monoglobus | 99.5 | 149 |
| | | | | | pectinilyticus | | |
| FBI00151 | Clostridium aldenense | bacteria | firmicutes | 358742 | Clostridium aldenense | 98.55 | 151 |
| FBI00152 | Dialister invisus | bacteria | firmicutes | 218538 | Dialister invisus | 99.58 | 152 |
| FBI00159 | Eisenbergiella tayi | bacteria | firmicutes | 1432052 | Eisenbergiella tayi | 99.03 | 159 |
| FBI00162 | Bifidobacterium catenulatum | bacteria | actinobacteria | 1686 | Bifidobacterium | 99.14 | 162 |
| | | | | | catenulatum | | |
| FBI00165 | Bacteroides massiliensis | bacteria | bacteroidetes | 204516 | Bacteroides massiliensis | 99.71 | 165 |
| FBI00167 | Dorea longicatena | bacteria | firmicutes | 88431 | Dorea longicatena | 99.39 | 167 |
| FBI00170 | Eggerthella lenta | bacteria | actinobacteria | 84112 | Eggerthella lenta | 98.61 | 170 |
| FBI00171 | Bilophila wadsworthia | bacteria | proteobacteria | 35833 | Desulfovibrio | 91.45 | 171 |
| | | | | | desulfuricans | | |
| FBI00174 | Lactobacillus rogosae | bacteria | firmicutes | 706562 | Lachnospira | 97.92 | 174 |
| | | | | | pectinoschiza | | |
| FBI00175 | Holdemanella biformis | bacteria | firmicutes | 1735 | Holdemanella biformis | 98.19 | 175 |
| FBI00176 | Ruthenibacterium lactatiformans | bacteria | firmicutes | 1550024 | Ruthenibacterium | 99.71 | 176 |
| | | | | | lactatiformans | | |
| FBI00177 | Parasutterella excrementihominis | bacteria | proteobacteria | 487175 | Parasutterella | 99.71 | 177 |
| | | | | | excrementihominis | | |
| FBI00180 | Alistipes sp. FBI00180 | bacteria | bacteroidetes | 239759 | Alistipes senegalensis | 97.56 | 180 |
| FBI00182 | Bacteroides coprocola | bacteria | bacteroidetes | 310298 | Bacteroides coprocola | 99.64 | 182 |
| FBI00184 | Bacteroides faecis | bacteria | bacteroidetes | 674529 | Bacteroides faecis | 99.78 | 184 |
| FBI00189 | Bacteroides ovatus | bacteria | bacteroidetes | 28116 | Bacteroides koreensis | 99.93 | 189 |
| FBI00190 | Bacteroides finegoldii | bacteria | bacteroidetes | 338188 | Bacteroides finegoldii | 98.91 | 190 |
| FBI00191 | Clostridiaceae sp. FBI00191 | bacteria | firmicutes | 31979 | Clostridium | 96.24 | 191 |
| | | | | | swellfunianum | | |
| FBI00194 | Ruminococcus faecis | bacteria | firmicutes | 592978 | Ruminococcus faecis | 98.41 | 194 |
| FBI00197 | Bifidobacterium bifidum | bacteria | actinobacteria | 1681 | Bifidobacterium bifidum | 99.85 | 197 |
| FBI00198 | Lachnoclostridium pacaense | bacteria | firmicutes | 1917870 | Lachnoclostridium | 99.71 | 198 |
| | | | | | pacaense | | |
| FBI00199 | Clostridium bolteae | bacteria | firmicutes | 208479 | Clostridium bolteae | 99.28 | 199 |
| FBI00200 | Longicatena caecimuris | bacteria | firmicutes | 1796635 | Longicatena caecimuris | 99.71 | 200 |
| FBI00201 | Eggerthella lenta | bacteria | actinobacteria | 84112 | Eggerthella lenta | 98.83 | 201 |
| FBI00205 | Blautia massiliensis | bacteria | firmicutes | 1737424 | Blautia luti | 97.55 | 205 |
| FBI00206 | Bacteroides xylanisolvens | bacteria | bacteroidetes | 371601 | Bacteroides xylanisolvens | 99.56 | 206 |
| FBI00208 | Anaerotruncus massiliensis | bacteria | firmicutes | 1673720 | Anaerotruncus colihominis | 96.52 | 208 |
| FBI00210 | Bifidobacterium bifidum | bacteria | actinobacteria | 1681 | Bifidobacterium bifidum | 99.93 | 210 |
| FBI00211 | Bacteroides vulgatus | bacteria | bacteroidetes | 821 | Bacteroides vulgatus | 99.78 | 211 |
| FBI00212 | Clostridium aldenense | bacteria | firmicutes | 358742 | Clostridium aldenense | 99.1 | 212 |
| FBI00220 | Megasphaera massiliensis | bacteria | firmicutes | 1232428 | Megasphaera massiliensis | 98.8 | 220 |
| FBI00221 | Butyricimonas faecihominis | bacteria | bacteroidetes | 1472416 | Butyricimonas faecihominis | 98.61 | 221 |
| FBI00224 | Sutterella wadsworthensis | bacteria | proteobacteria | 40545 | Sutterella wadsworthensis | 99.71 | 224 |
| FBI00226 | Catabacter hongkongensis | bacteria | firmicutes | 270498 | Catabacter hongkongensis | 99.71 | 226 |
| FBI00229 | Alistipes senegalensis | bacteria | bacteroidetes | 1288121 | Alistipes senegalensis | 99.19 | 229 |
| FBI00232 | Bacteroides stercoris | bacteria | bacteroidetes | 46506 | Bacteroides stercoris | 98.84 | 232 |
| FBI00233 | Ruminococcaceae sp. FBI00233 | bacteria | firmicutes | 474960 | Anaerotruncus | 91.63 | 233 |
| | | | | | colihominis | | |
| FBI00234 | Faecalicatena contorta | bacteria | firmicutes | 39482 | Faecalicatena contorta | 99.21 | 234 |
| FBI00236 | Eisenbergiella tayi | bacteria | firmicutes | 1432052 | Eisenbergiella tayi | 99.41 | 236 |
| FBI00237 | Dielma fastidiosa | bacteria | firmicutes | 1034346 | Dielma fastidiosa | 99.78 | 237 |
| FBI00238 | Alistipes sp. FBI00238 | bacteria | bacteroidetes | 239759 | Alistipes finegoldii | 95.84 | 238 |
| FBI00239 | Lactonifactor longoviformis | bacteria | firmicutes | 341220 | Lactonifactor | 98.99 | 239 |
| | | | | | longoviformis | | |
| FBI00243 | Eubacterium siraeum | bacteria | firmicutes | 39492 | Eubacterium siraeum | 98.53 | 243 |
| FBI00244 | Faecalibacterium prausnitzii | bacteria | firmicutes | 853 | Faecalibacterium | 98.69 | 244 |
| | | | | | prausnitzii | | |
| FBI00245 | Acidaminococcus intestini | bacteria | firmicutes | 187327 | Acidaminococcus | 99.72 | 245 |
| | | | | | intestini | | |
| FBI00248 | Neglecta timonensis | bacteria | firmicutes | 1776382 | Emergencia timonensis | 99.64 | 248 |
| FBI00249 | Citrobacter portucalensis | bacteria | proteobacteria | 1639133 | Citrobacter freundii | 99.79 | 249 |
| FBI00251 | Bifidobacterium | bacteria | actinobacteria | 28026 | Bifidobacterium | 99.85 | 251 |
| | pseudocatenulatum | | | | pseudocatenulatum | | |
| FBI00254 | Eubacterium hallii | bacteria | firmicutes | 39488 | Eubacterium hallii | 99.08 | 254 |
| FBI00255 | Hungatella effluvii | bacteria | firmicutes | 1096246 | Hungatella hathewayi | 98.56 | 255 |
| FBI00258 | Turicibacter sanguinis | bacteria | firmicutes | 154288 | Turicibacter sanguinis | 99.93 | 258 |
| FBI00260 | Eubacterium rectale | bacteria | firmicutes | 39491 | Eubacterium rectale | 99.64 | 260 |
| FBI00263 | Bacteroides caccae | bacteria | bacteroidetes | 47678 | Bacteroides caccae | 99.56 | 263 |
| FBI00267 | Anaerofustis stercorihominis | bacteria | firmicutes | 214853 | Anaerofustis | 97.29 | 267 |
| | | | | | stercorihominis | | |
| FBI00269 | Alistipes putredinis | bacteria | bacteroidetes | 28117 | Alistipes putredinis | 100 | 269 |
| FBI00271 | Bacteroides xylanisolvens | bacteria | bacteroidetes | 371601 | Bacteroides | 98.42 | 271 |
| | | | | | xylanisolvens | | |
| FBI00273 | Barnesiella intestinihominis | bacteria | bacteroidetes | 487174 | Barnesiella | 99.43 | 273 |
| | | | | | intestinihominis | | |
| FBI00274 | Eubacterium xylanophilum | bacteria | firmicutes | 39497 | Eubacterium | 93.5 | 274 |
| | | | | | xylanophilum | | |
| FBI00275 | Holdemanella biformis | bacteria | firmicutes | 1735 | Holdemanella biformis | 98.99 | 275 |
| FBI00277 | Alistipes onderdonkii | bacteria | bacteroidetes | 328813 | Alistipes onderdonkii | 99.63 | 277 |
| FBI00278 | Eubacterium ventriosum | bacteria | firmicutes | 39496 | Eubacterium ventriosum | 94.14 | 278 |
| FBI00281 | Senegalimassilia anaerobia | bacteria | actinobacteria | 1473216 | Senegalimassilia anaerobia | 99.45 | 281 |
| FBI00282 | Porphyromonas asaccharolytica | bacteria | bacteroidetes | 28123 | Porphyromonas | 99.35 | 282 |
| | | | | | asaccharolytica | | |
| FBI00288 | Blautia hydrogenotrophica | bacteria | firmicutes | 53443 | Blautia hydrogenotrophica | 99.57 | 288 |
| FBI00289 | Oxalobacter formigenes | bacteria | proteobacteria | 847 | Oxalobacter formigenes | 99.21 | 289 |
| FBI00290 | Lachnospiraceae sp. FBI00290 | bacteria | firmicutes | 186803 | Eubacterium | 94.81 | 290 |
| | | | | | ruminantium | | |

### Example 12: In Vivo Oxalate Reduction by Candidate Consortia in a Germ-Free Mouse Model Fed a Low-Complexity Diet

[0330] A set of five candidate oxalate-eliminating microbial consortia, comprising active and supportive microbes isolated from human fecal samples as described in Example 1, were tested for the ability to control oxalate levels in vivo in germ-free mice fed a limited ingredient, low-complexity diet supplemented with oxalate (see Table 1).

[0331] One week prior to colonization, germ-free C57Bl/6NTac mice (n=4 per condition) were fed a refined diet rich in casein and simple sugars supplemented with oxalate to induce hyperoxaluria (see Table 2). One week later, the candidate consortia described in Example 11 (I to V) were introduced to the mice via oral gavage. One group of mice was mock-colonized with PBS alone as a negative control. Another group of mice was colonized with a previously-characterized microbial consortium as a positive control, which contains microbial strains sourced from depositories and was previously shown to reduce oxalate levels in vivo (see Examples 6 and 7; Table 8). Urine and fecal samples were collected each week for two weeks thereafter, with an endpoint at 14 days following colonization. Terminal urine (collected immediately following euthanasia) was processed by solid-phase extraction and oxalate levels were quantified by LC/MS as described in Example 4.

[0332] Average urinary oxalate concentrations for each study group at study endpoint are reported in FIG. 13. Mice colonized with the positive control proof-of-concept community containing commercially sourced strains of O. formigenes (+) exhibited a 53% average reduction in urinary oxalate relative to the uncolonized negative control (−). The five proprietary candidate communities (I-V), each of which comprised three internally isolated strains of O. formigenes, were found to reduce urinary oxalate by 32-70%, demonstrating efficacy on par with the positive control community. The reduction in urinary oxalate for all tested communities was statistically significant relative to the negative control.

### Example 13: In Vivo Oxalate Reduction by Candidate Consortia in a Germ Free Mouse Fed a High-Complexity Diet

[0333] The set of five candidate oxalate-eliminating microbial consortia described in Example 10 were further tested for the ability to control oxalate levels in vivo in germ free mice fed a complex, nutritionally complete diet.

[0334] One week prior to colonization, germ-free C57Bl/6NTac mice (n=4 per condition) were fed a complex, grain-based diet and given ad libitum drinking water supplemented with 0.875% oxalate to induce hyperoxaluria. One week later, the mice were colonized with the therapeutic communities via oral gavage. One group of mice was mock-colonized with PBS alone as a negative control. Another group of mice was colonized with a previously-characterized microbial consortium as a positive control, which contained microbial strains sourced from depositories and was previously shown to reduce oxalate levels in vivo (see Examples 6 and 7; Table 8). Urine and fecal samples were collected each week for two weeks thereafter, with a study endpoint at 8 days following colonization. Terminal urine (collected immediately following euthanasia) was processed by solid-phase extraction and oxalate levels were quantified using LC-MS as described in Example 4.

[0335] Average urinary oxalate concentrations for each study group at study endpoint are presented in FIG. 14. Mice colonized with the positive control community containing commercially sourced strains of O. formigenes (+) exhibited a 54% average reduction in urinary oxalate relative to the uncolonized negative control (−). The five proprietary candidate communities (I-V), each of which comprised three internally isolated strains of O. formigenes, were found to reduce urinary oxalate by 49-75%, demonstrating efficacy on par with the positive control community. The reduction in urinary oxalate for all tested communities was statistically significant relative to the negative control.

### Example 14: In Vivo Oxalate Reduction by Candidate Consortia in a Humanized Gnotobiotic Mouse

[0336] The set of five candidate oxalate-eliminating microbial consortia described in Example 11 were further tested for the ability to control oxalate levels in vivo in humanized, recolonized mice fed a complex, nutritionally complete diet.

[0337] Germ-free C57B1/6NTac mice (n=4 per condition) were humanized by introducing a previously characterized human donor fecal sample that lacks O. formigenes and does not appreciably degrade urinary oxalate. One week following colonization, the humanized mice were fed a complex, grain-based diet supplemented with oxalate to induce hyperoxaluria. One week later, the mice were given an antibiotic cocktail containing ampicillin (1 mg/ml) and enrofloxacin (0.575 mg/ml) ad libidum in drinking water for seven days, after which the antibiotic treatment was ended and the therapeutic communities (I-V) were introduced via oral gavage. One group of mice was mock-colonized with PBS alone as a negative control. Another group of mice was colonized with a previously-characterized microbial consortium as a positive control, which contained microbial strains sourced from depositories and was previously shown to reduce oxalate levels in vivo (see Examples 6 and 7; Table 8). A final group of mice was colonized with a set of strains (“Putative Oxalate Degraders”) that included three donor-derived strains of O. formigenes in addition to other donor-derived strains predicted to have oxalate-degrading activity. This set of strains is listed in Table 21.

TABLE 21

| | | SEQ ID |
|---|---|---|
| Strain # | Species ID | NO: X |
| FBI00001 | Clostridium citroniae | 1 |
| FBI00002 | Bacteroides salyersiae | 2 |
| FBI00004 | Neglecta timonensis | 4 |
| FBI00008 | Blautia luti | 8 |
| FBI00009 | Bifidobacterium adolescentis | 9 |
| FBI00011 | Bifidobacterium longum | 11 |
| FBI00016 | Bifidobacterium pseudocatenulatum | 16 |
| FBI00017 | Blautia obeum | 17 |
| FBI00020 | Bacteroides thetaiotaomicron | 20 |
| FBI00021 | Bacteroides kribbi/Bacteroides koreensis | 21 |
| | species cluster | |
| FBI00028 | Oscillibacter sp. FBI00028 | 28 |
| FBI00030 | Eggerthella lenta | 30 |
| FBI00033 | Lachnospiraceae sp. FBI00033 | 33 |
| FBI00041 | Phascolarctobacterium faecium | 41 |
| FBI00043 | Bifidobacterium dentium | 43 |
| FBI00045 | Bifidobacterium adolescentis | 45 |
| FBI00050 | Bacteroides nordii | 50 |
| FBI00052 | Bacteroides xylanisolvens | 52 |
| FBI00053 | Lactobacillus rogosae | 53 |
| FBI00056 | Clostridium citroniae | 56 |
| FBI00060 | Bifidobacterium longum | 60 |
| FBI00063 | Lachnospira sp. FBI00063 FBI00285 FBI00364 | 63 |
| FBI00064 | Dorea sp. FBI00064 | 64 |
| FBI00067 | Oxalobacter formigenes | 67 |
| FBI00069 | Ruminococcus bromii | 69 |
| FBI00070 | Bacteroides kribbi/Bacteroides koreensis | 70 |
| | species cluster | |
| FBI00133 | Oxalobacter formigenes | 133 |
| FBI00289 | Oxalobacter formigenes | 289 |

[0338] Mice were sampled each week for two weeks following recolonization to determine microbiome composition and urinary oxalate levels, with a study endpoint at 14 days following colonization with the experimental communities. Average urinary oxalate concentrations for each study group at study endpoint are presented in FIG. 15. Re-colonization with the positive control proof-of-concept community containing commercially sourced strains of O. formigenes (+) yielded a 52% average reduction in urinary oxalate relevant to the mock-treated negative control (−). The five proprietary candidate communities (I-V), each of which comprises three donor-derived strains of O. formigenes, were found to reduce urinary oxalate by 22-65%, demonstrating efficacy on par with the positive control community. The reduction in urinary oxalate for all tested communities was statistically significant for all but one community (IV), with no significant differences observed between the remaining colonized groups. Notably, recolonization with the set of putative oxalate-degrading microbes alone did not result in a reduction in urinary oxalate, demonstrating the enhanced effect of combining a plurality of active oxalate-degrading microbes with a rationally designed supportive community.

[0339] Mouse fecal samples were analyzed by metagenomic sequencing in order to determine the composition of the microbiome. Briefly, genomic DNA was extracted from mouse fecal pellets and sequenced using short-read (Illumina) sequencing. Individual reads were classified against a comprehensive reference database, containing genomes from species throughout the tree of life. The total reads classified to a species were summed and normalized by genome size to obtain estimates of relative abundance. The results of this analysis are summarized in FIG. 16. Re-colonization with one of the candidate microbial consortia (I-V) resulted in enhanced microbiome species diversity relative to both the proof-of-concept consortium and the collection of Putative Oxalate Degraders.

### Example 15: Effect of Candidate Supportive Communities on In Vivo Engraftment of O. Formigenes

[0340] The set of five candidate oxalate-eliminating microbial consortia described in Example 10 were further tested for the ability to support engraftment of the active oxalate-degrading microbe O. formigenes into germ-free mice.

[0341] Germ-free C57Bl/6NTac mice (n=4 per condition) were colonized with candidate microbial consortia (I to V) via oral gavage. One group of mice was colonized with only a supportive community of microbes as a negative control. At the conclusion of the experiment, fecal samples were analyzed via metagenomic sequencing to measure the relative and absolute abundance of O. formigenes in the microbiome. Briefly, genomic DNA was extracted from mouse fecal pellets and sequenced using short-read (Illumina) sequencing. Individual reads were classified against a comprehensive reference database, containing genomes from species throughout the tree of life. The total reads classified to a species were summed and normalized by genome size to obtain estimates of relative abundance. Absolute abundance estimates were obtained by injecting a known quantity of heterologous cells into the fecal sample prior to DNA extraction and sequencing.

[0342] The results of this study are reported in FIG. 17. O. formigenes was detected in all mice colonized with one of the five candidate consortia, and treatment with candidate V resulted in the largest quantity of O. formigenes in the fecal sample.

### Example 16: Production of an Exemplary Therapeutic Oxalate-Degrading Consortium

[0343] This example describes the production of an exemplary microbial consortium intended for use in human subjects. In one embodiment of the invention, said exemplary consortium consists of the strains listed in Table 22, including three active oxalate-degrader strains of donor-derived O. formigenes. In another embodiment of the invention, said exemplary consortium consists of the strains listed in in Table 23. In another embodiment of the invention, said exemplary consortium consists of the strains listed in Table 24. All strains included in the exemplary consortium meet at least one of five criteria:
[0344] a. Has an experimentally confirmed ability to eliminate oxalate in vitro
[0345] b. Belongs to a species that is known to metabolize formate, a primary byproduct and potential inhibitor of oxalate metabolism in the gut
[0346] c. Belongs to a species known to contribute to metabolism of one or more nutrients typically found in the human diet
[0347] d. Belongs to species known to fulfill unique and potentially beneficial biological functions in the GI tract (e.g., bile salt hydrolase activity or butyrate production)
[0348] e. Belongs to a species found in the GI tract of one or more healthy human adults.

[0349] The final drug product consists of up to 7 drug substances, each comprising at least one characterized bacterial strain. Some drug substances are pure cultures, whereas others are from mixed-culture fermentation of anaerobic and facultative aerobic bacteria. The drug substance culture conditions are determined by one skilled in the art.

[0350] Cells are harvested and concentrated by a combination of microfiltration using 0.2-0.45 μm pore size membranes made of nonreactive polymers such as Polyvinylidene fluoride, Polysulfones, and/or nitrocellulose; and centrifugation (10,000-20,000 g force) to a final CFU concentration of 1×10⁶ to 1×10¹² CFU/ml. The concentrated biomass is mixed with sterilized cryoprotectant agent (CPA) at a volumetric ratio between 10:1 to 1:10.

[0351] The CPA is composed of a cryoprotectant/carbohydrate/bulking agent/nutrient such as glycerol (0 to 250 g/l), maltodextrin (0 to 100 g/l), sucrose (0 to 100 g/l), inulin (0 to 40 g/l), trehalose (0 to 50 g/l) and/or alginate (0 to 10 g/l). Additionally, antioxidants such as cysteine (0.25 to 0.50 g/l), ascorbic acid (0 to 5 g/l) and/or riboflavin (0 to 0.01 g/l) are added to CPA. The specific concentrations are determined by a person skilled in the art.

[0352] Finally, additional nutrients such as oxalate (0-100 mM) or formate (0-100 mM) are added to support robust revival of specific strains from the capsule, the specific concentrations being determined by one skilled in the art.

[0353] The cells are either stored frozen in a CPA or combination of CPAs, or are lyophilized to prepare various solid oral dosage forms (e.g., enteric coated capsules or enteric coated tablets). The formulated cells are lyophilized to yield a stable product. Primary drying is conducted below collapse temperature of the chosen formulation (typically below −20° C.), followed by secondary drying at higher temperature (5° C. or higher). Lyophilized powder is filled in “0” to “000” size capsules to accommodate various strengths. To prepare tablets, lyophilized powder is added to a binding agent (e.g. sucrose or starch) and pressed into tablets. The tablets are enteric coated to protect the drug product from the low pH gastric environment.

[0354] Composition of the drug product is defined by the Relative Abundance of the various intended strains. The relative abundance of microbial strains in the drug substance or drug product is determined as follows: total bacterial genomic DNA is extracted from a pelleted aliquot (e.g. 1 ml) of the drug substance/product and quantified, normalized by concentration, and prepared into an indexed library for whole-genome shotgun sequencing on an Illumina sequencer (e.g. NovaSeq). Following quality trimming, short paired-end Illumina reads (PE-150) are classified using a custom bioinformatics pipeline and taxonomically-structured database built from the genome sequences of strains in the drug product. The taxonomically-structured database links genome nucleotide sequences of a fixed length (k-mers) to a least common ancestor(s) (strain, species . . . phylum) that contain the same k-mer in the database. 150 base-pair sequencing reads are classified by retrieving the taxa for all k-mers in the read and assigning a classification based on the least common ancestor. Sequences that have no k-mers in the database are discarded. Reads that do not get classified to the strain level are distributed to the strain level using Bayes theorem to estimate true strain-level abundance. The relative abundance of a strain is calculated as the percentage of reads that are classified as that strain, divided by genome size. Absolute abundance is calculated by dividing the total bacterial cell number in the drug product (quantified by Beckman Coulter Counter) by the percent relative abundance.

[0355] A person of ordinary skill in the art shall be able to determine useful ratios of active and supportive microbes that constitute the exemplary consortium, and shall ensure that the relative abundance of supportive microbial strains is at least sufficient to enable function and stable engraftment of the plurality of active microbes.

TABLE 22

| | | | | NCBI | | % | SEQ |
|---|---|---|---|---|---|---|---|
| | | | | Taxonomy | | Match | ID NO: |
| Strain # | Species ID | Kingdom | Phylum | ID | Closest 16S Species | (16S) | X |
| FBI00001 | Clostridium citroniae | bacteria | firmicutes | 358743 | Clostridium citroniae | 99.64 | 1 |
| FBI00002 | Bacteroides salyersiae | bacteria | bacteroidetes | 291644 | Bacteroides salyersiae | 99.5 | 2 |
| FBI00004 | Neglecta timonensis | bacteria | firmicutes | 1776382 | Neglecta timonensis | 99.14 | 4 |
| FBI00009 | Bifidobacterium adolescentis | bacteria | actinobacteria | 1680 | Bifidobacterium faecale | 98.6 | 9 |
| FBI00010 | Blautia obeum | bacteria | firmicutes | 40520 | Blautia obeum | 98.12 | 10 |
| FBI00011 | Bifidobacterium longum | bacteria | actinobacteria | 216816 | Bifidobacterium longum | 99.28 | 11 |
| FBI00012 | Alistipes onderdonkii | bacteria | bacteroidetes | 328813 | Alistipes onderdonkii | 99.71 | 12 |
| FBI00013 | Parabacteroides merdae | bacteria | bacteroidetes | 46503 | Parabacteroides merdae | 99.5 | 13 |
| FBI00015 | Bacteroides uniformis | bacteria | bacteroidetes | 820 | Bacteroides uniformis | 99.78 | 15 |
| FBI00016 | Bifidobacterium pseudocatenulatum | bacteria | actinobacteria | 28026 | Bifidobacterium pseudocatenulatum | 99.64 | 16 |
| FBI00018 | Eubacterium rectale | bacteria | firmicutes | 39491 | Eubacterium rectale | 99.71 | 18 |
| FBI00019 | Alistipes timonensis | bacteria | bacteroidetes | 1465754 | Alistipes timonensis | 99.78 | 19 |
| FBI00020 | Bacteroides thetaiotaomicron | bacteria | bacteroidetes | 818 | Bacteroides thetaiotaomicron | 99.57 | 20 |
| FBI00021 | Bacteroides kribbi/ | bacteria | bacteroidetes | 816 | Bacteroides kribbi | 99.07 | 21 |
| | Bacteroides koreensis species | | | | | | |
| | cluster | | | | | | |
| FBI00022 | Alistipes putredinis | bacteria | bacteroidetes | 28117 | Alistipes putredinis | 99.93 | 22 |
| FBI00025 | Coprococcus comes | bacteria | firmicutes | 410072 | Coprococcus comes | 99.21 | 25 |
| FBI00027 | Fusicatenibacter saccharivorans | bacteria | firmicutes | 1150298 | Fusicatenibacter saccharivorans | 97.6 | 27 |
| FBI00029 | Parabacteroides distasonis | bacteria | bacteroidetes | 823 | Parabacteroides distasonis | 99.26 | 29 |
| FBI00030 | Eggerthella lenta | bacteria | firmicutes | 84112 | Eggerthella lenta | 98.47 | 30 |
| FBI00032 | Anaerostipes hadrus | bacteria | firmicutes | 649756 | Anaerostipes hadrus | 99.64 | 32 |
| FBI00033 | Lachnospiraceae sp. FBI00033 | bacteria | firmicutes | 186803 | Clostridium amygdalinum | 93.56 | 33 |
| FBI00034 | Eubacterium eligens | bacteria | firmicutes | 39485 | Eubacterium eligens | 98.78 | 34 |
| FBI00036 | Blautia faecis | bacteria | firmicutes | 871665 | Blautia faecis | 99.53 | 36 |
| FBI00038 | Coprococcus eutactus | bacteria | firmicutes | 33043 | Coprococcus eutactus | 95.96 | 38 |
| FBI00040 | Bilophila wadsworthia | bacteria | proteobacteria | 35833 | Desulfovibrio desulfuricans | 91.38 | 40 |
| FBI00043 | Bifidobacterium dentium | bacteria | actinobacteria | 1689 | Bifidobacterium dentium | 99.35 | 43 |
| FBI00044 | Blautia wexlerae | bacteria | firmicutes | 418240 | Blautia wexlerae | 98.69 | 44 |
| FBI00046 | Bacteroides caccae | bacteria | bacteroidetes | 47678 | Bacteroides caccae | 99.71 | 46 |
| FBI00047 | Eubacterium eligens | bacteria | firmicutes | 39485 | Eubacterium eligens | 98.79 | 47 |
| FBI00048 | Fusicatenibacter saccharivorans | bacteria | firmicutes | 1150298 | Fusicatenibacter saccharivorans | 97.95 | 48 |
| FBI00049 | Dialister succinatiphilus | bacteria | firmicutes | 487173 | Dialister succinatiphilus | 95.74 | 49 |
| FBI00050 | Bacteroides nordii | bacteria | bacteroidetes | 291645 | Bacteroides nordii | 98.63 | 50 |
| FBI00051 | Dorea formicigenerans | bacteria | firmicutes | 39486 | Dorea formicigenerans | 98.07 | 51 |
| FBI00052 | Bacteroides xylanisolvens | bacteria | bacteroidetes | 371601 | Bacteroides xylanisolvens | 99.14 | 52 |
| FBI00053 | Lactobacillus rogosae | bacteria | firmicutes | 706562 | Lachnospira pectinoschiza | 97.36 | 53 |
| FBI00055 | Bacteroides kribbi/ | bacteria | bacteroidetes | 816 | Bacteroides kribbi | 99.64 | 55 |
| | Bacteroides koreensis species | | | | | | |
| | cluster | | | | | | |
| FBI00056 | Clostridium citroniae | bacteria | firmicutes | 358743 | Clostridium citroniae | 99.2 | 56 |
| FBI00057 | Dorea longicatena | bacteria | firmicutes | 88431 | Dorea longicatena | 99.7 | 57 |
| FBI00059 | Bacteroides stercorirosoris | bacteria | bacteroidetes | 871324 | Bacteroides oleiciplenus | 98.81 | 59 |
| FBI00060 | Bifidobacterium longum | bacteria | actinobacteria | 216816 | Bifidobacterium longum | 99.49 | 60 |
| FBI00061 | Alistipes shahii | bacteria | bacteroidetes | 328814 | Alistipes shahii | 99.19 | 61 |
| FBI00062 | Collinsella aerofaciens | bacteria | actinobacteria | 74426 | Collinsella aerofaciens | 99.48 | 62 |
| FBI00066 | Parasutterella excrementihominis | bacteria | proteobacteria | 487175 | Parasutterella excrementihominis | 99.13 | 66 |
| FBI00067 | Oxalobacter formigenes | bacteria | proteobacteria | 847 | Oxalobacter formigenes | 98.84 | 67 |
| FBI00068 | Akkermansia muciniphila | bacteria | verruco- | 239935 | Akkermansia muciniphila | 99.42 | 68 |
| | | | microbia | | | | |
| FBI00069 | Ruminococcus bromii | bacteria | firmicutes | 40518 | Ruminococcus bromii | 98.84 | 69 |
| FBI00070 | Bacteroides kribbi/ | bacteria | bacteroidetes | 816 | Bacteroides koreensis | 99.71 | 70 |
| | Bacteroides koreensis species | | | | | | |
| | cluster | | | | | | |
| FBI00071 | Lachnospiraceae sp. FBI00071 | bacteria | firmicutes | 186803 | Roseburia faecis | 94.92 | 71 |
| FBI00072 | Coprococcus eutactus | bacteria | firmicutes | 33043 | Coprococcus eutactus | 96.17 | 72 |
| FBI00074 | Clostridium fessum | bacteria | firmicutes | 2126740 | Clostridium symbiosum | 94.03 | 74 |
| FBI00075 | Paraprevotella clara | bacteria | bacteroidetes | 454154 | Paraprevotella clara | 98.85 | 75 |
| FBI00076 | Bacteroides thetaiotaomicron | bacteria | bacteroidetes | 818 | Bacteroides thetaiotaomicron | 99.78 | 76 |
| FBI00077 | Sutterella wadsworthensis | bacteria | proteobacteria | 40545 | Sutterella wadsworthensis | 99.86 | 77 |
| FBI00078 | Blautia obeum | bacteria | firmicutes | 40520 | Blautia obeum | 98.34 | 78 |
| FBI00079 | Clostridium clostridioforme | bacteria | firmicutes | 1531 | Clostridium clostridioforme | 99.14 | 79 |
| FBI00080 | Sutterella massiliensis | bacteria | proteobacteria | 1816689 | Sutterella massiliensis | 99.78 | 80 |
| FBI00081 | Porphyromonas asaccharolytica | bacteria | bacteroidetes | 28123 | Porphyromonas asaccharolytica | 99.35 | 81 |
| FBI00082 | Ruminococcaceae sp. FBI00082 | bacteria | firmicutes | 541000 | Phocea massiliensis | 93.08 | 82 |
| | FBI00097 | | | | | | |
| FBI00085 | Ruminococcus bromii | bacteria | firmicutes | 40518 | Ruminococcus bromii | 98.62 | 85 |
| FBI00087 | Clostridium scindens | bacteria | firmicutes | 29347 | Clostridium scindens | 98.28 | 87 |
| FBI00092 | Monoglobus pectinilyticus | bacteria | firmicutes | 1981510 | Monoglobus pectinilyticus | 99.5 | 92 |
| FBI00093 | Roseburia hominis | bacteria | firmicutes | 301301 | Roseburia hominis | 99.71 | 93 |
| FBI00096 | Eggerthella lenta | bacteria | actinobacteria | 84112 | Eggerthella lenta | 98.76 | 96 |
| FBI00097 | Ruminococcaceae sp. FBI00082 | bacteria | firmicutes | 541000 | Phocea massiliensis | 93.07 | 97 |
| | FBI00097 | | | | | | |
| FBI00099 | Gordonibacter pamelaeae | bacteria | actinobacteria | 471189 | Gordonibacter pamelaeae | 99.56 | 99 |
| FBI00101 | Faecalibacterium prausnitzii | bacteria | firmicutes | 853 | Faecalibacterium prausnitzii | 97.97 | 101 |
| FBI00102 | Clostridium fessum | bacteria | firmicutes | 2126740 | Clostridium symbiosum | 94.31 | 102 |
| FBI00104 | Blautia wexlerae | bacteria | firmicutes | 418240 | Blautia luti | 97.18 | 104 |
| FBI00109 | Coprococcus comes | bacteria | firmicutes | 410072 | Coprococcus comes | 98.39 | 109 |
| FBI00110 | Lachnoclostridium pacaense | bacteria | firmicutes | 1917870 | Lachnoclostridium pacaense | 98.92 | 110 |
| FBI00111 | Bacteroides vulgatus | bacteria | bacteroidetes | 821 | Bacteroides vulgatus | 99.43 | 111 |
| FBI00112 | Bacteroides uniformis | bacteria | bacteroidetes | 820 | Bacteroides uniformis | 99.78 | 112 |
| FBI00113 | Parabacteroides merdae | bacteria | bacteroidetes | 46503 | Parabacteroides merdae | 99.79 | 113 |
| FBI00115 | Dorea formicigenerans | bacteria | firmicutes | 39486 | Dorea formicigenerans | 97.98 | 115 |
| FBI00116 | Ruminococcus faecis | bacteria | firmicutes | 592978 | Ruminococcus faecis | 99.57 | 116 |
| FBI00117 | Blautia faecis | bacteria | firmicutes | 871665 | Blautia faecis | 99.52 | 117 |
| FBI00120 | Hungatella effluvii | bacteria | firmicutes | 154046 | Hungatella hathewayi | 98.78 | 120 |
| FBI00123 | Roseburia hominis | bacteria | firmicutes | 301301 | Roseburia hominis | 100 | 123 |
| FBI00124 | Anaerostipes hadrus | bacteria | firmicutes | 649756 | Anaerostipes hadrus | 99.86 | 124 |
| FBI00125 | Bacteroides stercoris | bacteria | bacteroidetes | 46506 | Bacteroides stercoris | 99.64 | 125 |
| FBI00126 | Bifidobacterium adolescentis | bacteria | actinobacteria | 1680 | Bifidobacterium adolescentis | 98.98 | 126 |
| FBI00127 | Collinsella aerofaciens | bacteria | actinobacteria | 74426 | Collinsella aerofaciens | 98.81 | 127 |
| FBI00128 | Hungatella effluvii | bacteria | firmicutes | 1096246 | Hungatella effluvii | 98.71 | 128 |
| FBI00132 | Gordonibacter pamelaeae | bacteria | actinobacteria | 471189 | Gordonibacter pamelaeae | 99.48 | 132 |
| FBIOO133 | Oxalobacter formigenes | bacteria | proteobacteria | 847 | Oxalobacter formigenes | 99.21 | 133 |
| FBI00135 | Bifidobacterium pseudocatenulatum | bacteria | actinobacteria | 28026 | Bifidobacterium pseudocatenulatum | 99.57 | 135 |
| FBI00137 | Bacteroides fragilis | bacteria | bacteroidetes | 817 | Bacteroides fragilis | 99.71 | 137 |
| FBI00140 | Phascolarctobacterium faecium | bacteria | firmicutes | 33025 | Phascolarctobacterium faecium | 99.58 | 140 |
| FBI00141 | Phascolarctobacterium faecium | bacteria | firmicutes | 33025 | Phascolarctobacterium faecium | 99.15 | 141 |
| FBI00145 | Bifidobacterium adolescentis | bacteria | actinobacteria | 1680 | Bifidobacterium adolescentis | 99.14 | 145 |
| FBI00147 | Clostridium bolteae | bacteria | firmicutes | 208479 | Clostridium bolteae | 99.28 | 147 |
| FBI00149 | Monoglobus pectinilyticus | bacteria | firmicutes | 1981510 | Monoglobus pectinilyticus | 99.5 | 149 |
| FBI00151 | Clostridium aldenense | bacteria | firmicutes | 358742 | Clostridium aldenense | 98.55 | 151 |
| FBI00152 | Dialister invisus | bacteria | firmicutes | 218538 | Dialister invisus | 99.58 | 152 |
| FBI00159 | Eisenbergiella tayi | bacteria | firmicutes | 1432052 | Eisenbergiella tayi | 99.03 | 159 |
| FBI00162 | Bifidobacterium catenulatum | bacteria | actinobacteria | 1686 | Bifidobacterium catenulatum | 99.14 | 162 |
| FBI00165 | Bacteroides massiliensis | bacteria | bacteroidetes | 204516 | Bacteroides massiliensis | 99.71 | 165 |
| FBI00167 | Dorea longicatena | bacteria | firmicutes | 88431 | Dorea longicatena | 99.39 | 167 |
| FBI00170 | Eggerthella lenta | bacteria | actinobacteria | 84112 | Eggerthella lenta | 98.61 | 170 |
| FBI00171 | Bilophila wadsworthia | bacteria | proteobacteria | 35833 | Desulfovibrio desulfuricans | 91.45 | 171 |
| FBI00174 | Lactobacillus rogosae | bacteria | firmicutes | 706562 | Lachnospira pectinoschiza | 97.92 | 174 |
| FBI00175 | Holdemanella biformis | bacteria | firmicutes | 1735 | Holdemanella biformis | 98.19 | 175 |
| FBI00176 | Ruthenibacterium lactatiformans | bacteria | firmicutes | 1550024 | Ruthenibacterium lactatiformans | 99.71 | 176 |
| FBI00177 | Parasutterella excrementihominis | bacteria | proteobacteria | 487175 | Parasutterella excrementihominis | 99.71 | 177 |
| FBI00180 | Alistipes sp. FBI00180 | bacteria | bacteroidetes | 239759 | Alistipes senegalensis | 97.56 | 180 |
| FBI00182 | Bacteroides coprocola | bacteria | bacteroidetes | 310298 | Bacteroides coprocola | 99.64 | 182 |
| FBI00184 | Bacteroides faecis | bacteria | bacteroidetes | 674529 | Bacteroides faecis | 99.78 | 184 |
| FBI00189 | Bacteroides ovatus | bacteria | bacteroidetes | 28116 | Bacteroides koreensis | 99.93 | 189 |
| FBI00190 | Bacteroides finegoldii | bacteria | bacteroidetes | 338188 | Bacteroides finegoldii | 98.91 | 190 |
| FBI00191 | Clostridiaceae sp. FBI00191 | bacteria | firmicutes | 31979 | Clostridium swellfunianum | 96.24 | 191 |
| FBI00194 | Ruminococcus faecis | bacteria | firmicutes | 592978 | Ruminococcus faecis | 98.41 | 194 |
| FBI00197 | Bifidobacterium bifidum | bacteria | actinobacteria | 1681 | Bifidobacterium bifidum | 99.85 | 197 |
| FBI00198 | Lachnoclostridium pacaense | bacteria | firmicutes | 1917870 | Lachnoclostridium pacaense | 99.71 | 198 |
| FBI00199 | Clostridium bolteae | bacteria | firmicutes | 208479 | Clostridium bolteae | 99.28 | 199 |
| FBI00200 | Longicatena caecimuris | bacteria | firmicutes | 1796635 | Longicatena caecimuris | 99.71 | 200 |
| FBI00201 | Eggerthella lenta | bacteria | actinobacteria | 84112 | Eggerthella lenta | 98.83 | 201 |
| FBI00205 | Blautia massiliensis | bacteria | firmicutes | 1737424 | Blautia luti | 97.55 | 205 |
| FBI00206 | Bacteroides xylanisolvens | bacteria | bacteroidetes | 371601 | Bacteroides xylanisolvens | 99.56 | 206 |
| FBI00208 | Anaerotruncus massiliensis | bacteria | firmicutes | 1673720 | Anaerotruncus colihominis | 96.52 | 208 |
| FBI00210 | Bifidobacterium bifidum | bacteria | actinobacteria | 1681 | Bifidobacterium bifidum | 99.93 | 210 |
| FBI00211 | Bacteroides vulgatus | bacteria | bacteroidetes | 821 | Bacteroides vulgatus | 99.78 | 211 |
| FBI00212 | Clostridium aldenense | bacteria | firmicutes | 358742 | Clostridium aldenense | 99.1 | 212 |
| FBI00220 | Megasphaera massiliensis | bacteria | firmicutes | 1232428 | Megasphaera massiliensis | 98.8 | 220 |
| FBI00221 | Butyricimonas faecihominis | bacteria | bacteroidetes | 1472416 | Butyricimonas faecihominis | 98.61 | 221 |
| FBI00224 | Sutterella wadsworthensis | bacteria | proteobacteria | 40545 | Sutterella wadsworthensis | 99.71 | 224 |
| FBI00226 | Catabacter hongkongensis | bacteria | firmicutes | 270498 | Catabacter hongkongensis | 99.71 | 226 |
| FBI00229 | Alistipes senegalensis | bacteria | bacteroidetes | 1288121 | Alistipes senegalensis | 99.19 | 229 |
| FBI00231 | Parabacteroides distasonis | bacteria | bacteroidetes | 823 | Parabacteroides distasonis | 99.11 | 231 |
| FBI00232 | Bacteroides stercoris | bacteria | bacteroidetes | 46506 | Bacteroides stercoris | 98.84 | 232 |
| FBI00233 | Ruminococcaceae sp. FBI00233 | bacteria | firmicutes | 474960 | Anaerotruncus colihominis | 91.63 | 233 |
| FBI00235 | Alistipes shaliii | bacteria | bacteroidetes | 328814 | Alistipes shahii | 99.86 | 235 |
| FBI00236 | Eisenbergiella tayi | bacteria | firmicutes | 1432052 | Eisenbergiella tayi | 99.41 | 236 |
| FBI00237 | Dielma fastidiosa | bacteria | firmicutes | 1034346 | Dielma fastidiosa | 99.78 | 237 |
| FBI00238 | Alistipes sp. FBI00238 | bacteria | bacteroidetes | 239759 | Alistipes finegoldii | 95.84 | 238 |
| FBI00243 | Eubacterium siraeum | bacteria | firmicutes | 39492 | Eubacterium siraeum | 98.53 | 243 |
| FBI00244 | Faecalibacterium prausnitzii | bacteria | firmicutes | 853 | Faecalibacterium prausnitzii | 98.69 | 244 |
| FBI00245 | Acidaminococcus intestini | bacteria | firmicutes | 187327 | Acidaminococcus intestini | 99.72 | 245 |
| FBI00248 | Neglecta timonensis | bacteria | firmicutes | 1776382 | Emergencia timonensis | 99.64 | 248 |
| FBI00251 | Bifidobacterium pseudocatenulatum | bacteria | actinobacteria | 28026 | Bifidobacterium pseudocatenulatum | 99.85 | 251 |
| FBI00254 | Eubacterium hallii | bacteria | firmicutes | 39488 | Eubacterium hallii | 99.08 | 254 |
| FBI00255 | Hungatella effluvii | bacteria | firmicutes | 1096246 | Hungatella hathewayi | 98.56 | 255 |
| FBI00258 | Turicibacter sanguinis | bacteria | firmicutes | 154288 | Turicibacter sanguinis | 99.93 | 258 |
| FBI00260 | Eubacterium rectale | bacteria | firmicutes | 39491 | Eubacterium rectale | 99.64 | 260 |
| FBI00263 | Bacteroides caccae | bacteria | bacteroidetes | 47678 | Bacteroides caccae | 99.56 | 263 |
| FBI00267 | Anaerofustis stercorihominis | bacteria | firmicutes | 214853 | Anaerofustis stercorihominis | 97.29 | 267 |
| FBI00269 | Alistipes putredinis | bacteria | bacteroidetes | 28117 | Alistipes putredinis | 100 | 269 |
| FBI00270 | Methanobrevibacter smithii | archaea | euryarchaeota | 2173 | Methanobrevibacter smithii | 99.69 | 270 |
| FBI00271 | Bacteroides xylanisolvens | bacteria | bacteroidetes | 371601 | Bacteroides xylanisolvens | 98.42 | 271 |
| FBI00273 | Bamesiella intestinihominis | bacteria | bacteroidetes | 487174 | Bamesiella intestinihominis | 99.43 | 273 |
| FBI00274 | Eubacterium xylanophilum | bacteria | firmicutes | 39497 | Eubacterium xylanophilum | 93.5 | 274 |
| FBI00275 | Holdemanella biformis | bacteria | firmicutes | 1735 | Holdemanella biformis | 98.99 | 275 |
| FBI00277 | Alistipes onderdonkii | bacteria | bacteroidetes | 328813 | Alistipes onderdonkii | 99.63 | 277 |
| FBI00278 | Eubacterium ventriosum | bacteria | firmicutes | 39496 | Eubacterium ventriosum | 94.14 | 278 |
| FBI00281 | Senegalimassilia anaerobia | bacteria | actinobacteria | 1473216 | Senegalimassilia anaerobia | 99.45 | 281 |
| FBI00282 | Porphyromonas asaccharolytica | bacteria | bacteroidetes | 28123 | Porphyromonas asaccharolytica | 99.35 | 282 |
| FBI00288 | Blautia hydrogenotrophica | bacteria | firmicutes | 53443 | Blautia hydrogenotrophica | 99.57 | 288 |
| FBI00289 | Oxalobacter formigenes | bacteria | proteobacteria | 847 | Oxalobacter formigenes | 99.21 | 289 |
| FBI00290 | Lachnospiraceae sp. FBI00290 | bacteria | firmicutes | 186803 | Eubacterium ruminantium | 94.81 | 290 |
| FBI00292 | Methanobrevibacter smithii | archaea | euryarchaeota | 2173 | Methanobrevibacter smithii | 99.44 | 292 |
| FBI00377 | Clostridiales sp. FBI00377 | bacteria | firmicutes | 186802 | Christensenella massiliensis | 88.69 | 377 |

TABLE 23

| | | | | NCBI | | % | SEQ |
|---|---|---|---|---|---|---|---|
| | | | | Taxonomy | | Match | ID NO: |
| Strain # | Species ID | Kingdom | Phylum | ID | Closest 16S Species | (16S) | X |
| FBI00001 | Clostridium citroniae | bacteria | firmicutes | 358743 | Clostridium citroniae | 99.64 | 1 |
| FBI00002 | Bacteroides salyersiae | bacteria | bacteroidetes | 291644 | Bacteroides salyersiae | 99.5 | 2 |
| FBI00004 | Neglecta timonensis | bacteria | firmicutes | 1776382 | Neglecta timonensis | 99.14 | 4 |
| FBI00009 | Bifidobacterium adolescentis | bacteria | actinobacteria | 1680 | Bifidobacterium faecale | 98.6 | 9 |
| FBI00010 | Blautia obeum | bacteria | firmicutes | 40520 | Blautia obeum | 98.12 | 10 |
| FBI00011 | Bifidobacterium longum | bacteria | actinobacteria | 216816 | Bifidobacterium longum | 99.28 | 11 |
| FBI00012 | Alistipes onderdonkii | bacteria | bacteroidetes | 328813 | Alistipes onderdonkii | 99.71 | 12 |
| FBI00013 | Parabacteroides merdae | bacteria | bacteroidetes | 46503 | Parabacteroides merdae | 99.5 | 13 |
| FBI00015 | Bacteroides uniformis | bacteria | bacteroidetes | 820 | Bacteroides uniformis | 99.78 | 15 |
| FBI00016 | Bifidobacterium pseudocatenulatum | bacteria | actinobacteria | 28026 | Bifidobacterium pseudocatenulatum | 99.64 | 16 |
| FBI00018 | Eubacterium rectale | bacteria | firmicutes | 39491 | Eubacterium rectale | 99.71 | 18 |
| FBI00019 | Alistipes timonensis | bacteria | bacteroidetes | 1465754 | Alistipes timonensis | 99.78 | 19 |
| FBI00020 | Bacteroides thetaiotaomicron | bacteria | bacteroidetes | 818 | Bacteroides thetaiotaomicron | 99.57 | 20 |
| FBI00021 | Bacteroides kribbi/ | bacteria | bacteroidetes | 816 | Bacteroides kribbi | 99.07 | 21 |
| | Bacteroides koreensis species | | | | | | |
| | cluster | | | | | | |
| FBI00022 | Alistipes putredinis | bacteria | bacteroidetes | 28117 | Alistipes putredinis | 99.93 | 22 |
| FBI00025 | Coprococcus comes | bacteria | firmicutes | 410072 | Coprococcus comes | 99.21 | 25 |
| FBI00027 | Fusicatenibacter saccharivorans | bacteria | firmicutes | 1150298 | Fusicatenibacter saccharivorans | 97.6 | 27 |
| FBI00029 | Parabacteroides distasonis | bacteria | bacteroidetes | 823 | Parabacteroides distasonis | 99.26 | 29 |
| FBI00030 | Eggerthella lenta | bacteria | firmicutes | 84112 | Eggerthella lenta | 98.47 | 30 |
| FBI00032 | Anaerostipes hadrus | bacteria | firmicutes | 649756 | Anaerostipes hadrus | 99.64 | 32 |
| FBI00033 | Lachnospiraceae sp. FBI00033 | bacteria | firmicutes | 186803 | Clostridium amygdalinum | 93.56 | 33 |
| FBI00034 | Eubacterium eligens | bacteria | firmicutes | 39485 | Eubacterium eligens | 98.78 | 34 |
| FBI00036 | Blautia faecis | bacteria | firmicutes | 871665 | Blautia faecis | 99.53 | 36 |
| FBI00038 | Coprococcus eutactus | bacteria | firmicutes | 33043 | Coprococcus eutactus | 95.96 | 38 |
| FBI00040 | Bilophila wadsworthia | bacteria | proteobacteria | 35833 | Desulfovibrio desulfuricans | 91.38 | 40 |
| FBI00043 | Bifidobacterium dentium | bacteria | actinobacteria | 1689 | Bifidobacterium dentium | 99.35 | 43 |
| FBI00044 | Blautia wexlerae | bacteria | firmicutes | 418240 | Blautia wexlerae | 98.69 | 44 |
| FBI00046 | Bacteroides caccae | bacteria | bacteroidetes | 47678 | Bacteroides caccae | 99.71 | 46 |
| FBI00047 | Eubacterium eligens | bacteria | firmicutes | 39485 | Eubacterium eligens | 98.79 | 47 |
| FBI00048 | Fusicatenibacter saccharivorans | bacteria | firmicutes | 1150298 | Fusicatenibacter saccharivorans | 97.95 | 48 |
| FBI00049 | Dialister succinatiphilus | bacteria | firmicutes | 487173 | Dialister succinatiphilus | 95.74 | 49 |
| FBI00050 | Bacteroides nordii | bacteria | bacteroidetes | 291645 | Bacteroides nordii | 98.63 | 50 |
| FBI00051 | Dorea formicigenerans | bacteria | firmicutes | 39486 | Dorea formicigenerans | 98.07 | 51 |
| FBI00052 | Bacteroides xylanisolvens | bacteria | bacteroidetes | 371601 | Bacteroides xylanisolvens | 99.14 | 52 |
| FBI00053 | Lactobacillus rogosae | bacteria | firmicutes | 706562 | Lachnospira pectinoschiza | 97.36 | 53 |
| FBI00055 | Bacteroides kribbi/ | bacteria | bacteroidetes | 816 | Bacteroides kribbi | 99.64 | 55 |
| | Bacteroides koreensis species | | | | | | |
| | cluster | | | | | | |
| FBI00056 | Clostridium citroniae | bacteria | firmicutes | 358743 | Clostridium citroniae | 99.2 | 56 |
| FBI00057 | Dorea longicatena | bacteria | firmicutes | 88431 | Dorea longicatena | 99.7 | 57 |
| FBI00059 | Bacteroides stercorirosoris | bacteria | bacteroidetes | 871324 | Bacteroides oleiciplenus | 98.81 | 59 |
| FBI00060 | Bifidobacterium longum | bacteria | actinobacteria | 216816 | Bifidobacterium longum | 99.49 | 60 |
| FBI00061 | Alistipes shahii | bacteria | bacteroidetes | 328814 | Alistipes shahii | 99.19 | 61 |
| FBI00062 | Collinsella aerofaciens | bacteria | actinobacteria | 74426 | Collinsella aerofaciens | 99.48 | 62 |
| FBI00066 | Parasutterella excrementihominis | bacteria | proteobacteria | 487175 | Parasutterella excrementihominis | 99.13 | 66 |
| FBI00067 | Oxalobacter formigenes | bacteria | proteobacteria | 847 | Oxalobacter formigenes | 98.84 | 67 |
| FBI00068 | Akkermansia muciniphila | bacteria | verrucomicrobi a | 239935 | Akkermansia muciniphila | 99.42 | 68 |
| FBI00069 | Ruminococcus bromii | bacteria | firmicutes | 40518 | Ruminococcus bromii | 98.84 | 69 |
| FBI00070 | Bacteroides kribbi/ | bacteria | bacteroidetes | 816 | Bacteroides koreensis | 99.71 | 70 |
| | Bacteroides koreensis species | | | | | | |
| | cluster | | | | | | |
| FBI00071 | Lachnospiraceae sp. FBI00071 | bacteria | firmicutes | 186803 | Roseburia faecis | 94.92 | 71 |
| FBI00072 | Coprococcus eutactus | bacteria | firmicutes | 33043 | Coprococcus eutactus | 96.17 | 72 |
| FBI00074 | Clostridium fessum | bacteria | firmicutes | 2126740 | Clostridium symbiosum | 94.03 | 74 |
| FBI00075 | Paraprevotella clara | bacteria | bacteroidetes | 454154 | Paraprevotella clara | 98.85 | 75 |
| FBI00076 | Bacteroides thetaiotaomicron | bacteria | bacteroidetes | 818 | Bacteroides thetaiotaomicron | 99.78 | 76 |
| FBI00077 | Sutterella wadsworthensis | bacteria | proteobacteria | 40545 | Sutterella wadsworthensis | 99.86 | 77 |
| FBI00078 | Blautia obeum | bacteria | firmicutes | 40520 | Blautia obeum | 98.34 | 78 |
| FBI00079 | Clostridium clostridioforme | bacteria | firmicutes | 1531 | Clostridium clostridioforme | 99.14 | 79 |
| FBI00080 | Sutterella massiliensis | bacteria | proteobacteria | 1816689 | Sutterella massiliensis | 99.78 | 80 |
| FBI00081 | Porphyromonas asaccharolytica | bacteria | bacteroidetes | 28123 | Porphyromonas asaccharolytica | 99.35 | 81 |
| FBI00082 | Ruminococcaceae sp. FBI00082 | bacteria | firmicutes | 541000 | Phocea massiliensis | 93.08 | 82 |
| | FBI00097 | | | | | | |
| FBI00085 | Ruminococcus bromii | bacteria | firmicutes | 40518 | Ruminococcus bromii | 98.62 | 85 |
| FBI00087 | Clostridium scindens | bacteria | firmicutes | 29347 | Clostridium scindens | 98.28 | 87 |
| FBI00092 | Monoglobus pectinilyticus | bacteria | firmicutes | 1981510 | Monoglobus pectinilyticus | 99.5 | 92 |
| FBI00093 | Roseburia hominis | bacteria | firmicutes | 301301 | Roseburia hominis | 99.71 | 93 |
| FBI00096 | Eggerthella lenta | bacteria | actinobacteria | 84112 | Eggerthella lenta | 98.76 | 96 |
| FBI00097 | Ruminococcaceae sp. FBI00082 | bacteria | firmicutes | 541000 | Phocea massiliensis | 93.07 | 97 |
| | FBI00097 | | | | | | |
| FBI00099 | Gordonibacter pamelaeae | bacteria | actinobacteria | 471189 | Gordonibacter pamelaeae | 99.56 | 99 |
| FBI00101 | Faecalibacterium prausnitzii | bacteria | firmicutes | 853 | Faecalibacterium prausnitzii | 97.97 | 101 |
| FBI00102 | Clostridium fessum | bacteria | firmicutes | 2126740 | Clostridium symbiosum | 94.31 | 102 |
| FBI00104 | Blautia wexlerae | bacteria | firmicutes | 418240 | Blautia luti | 97.18 | 104 |
| FBI00109 | Coprococcus comes | bacteria | firmicutes | 410072 | Coprococcus comes | 98.39 | 109 |
| FBI00110 | Lachnoclostridium pacaense | bacteria | firmicutes | 1917870 | Lachnoclostridium pacaense | 98.92 | 110 |
| FBI00111 | Bacteroides vulgatus | bacteria | bacteroidetes | 821 | Bacteroides vulgatus | 99.43 | 111 |
| FBI00112 | Bacteroides uniformis | bacteria | bacteroidetes | 820 | Bacteroides uniformis | 99.78 | 112 |
| FBI00113 | Parabacteroides merdae | bacteria | bacteroidetes | 46503 | Parabacteroides merdae | 99.79 | 113 |
| FBI00115 | Dorea formicigenerans | bacteria | firmicutes | 39486 | Dorea formicigenerans | 97.98 | 115 |
| FBI00116 | Ruminococcus faecis | bacteria | firmicutes | 592978 | Ruminococcus faecis | 99.57 | 116 |
| FBI00117 | Blautia faecis | bacteria | firmicutes | 871665 | Blautia faecis | 99.52 | 117 |
| FBI00120 | Hungatella effluvii | bacteria | firmicutes | 154046 | Hungatella hathewayi | 98.78 | 120 |
| FBI00123 | Roseburia hominis | bacteria | firmicutes | 301301 | Roseburia hominis | 100 | 123 |
| FBI00124 | Anaerostipes hadrus | bacteria | firmicutes | 649756 | Anaerostipes hadrus | 99.86 | 124 |
| FBI00125 | Bacteroides stercoris | bacteria | bacteroidetes | 46506 | Bacteroides stercoris | 99.64 | 125 |
| FBI00126 | Bifidobacterium adolescentis | bacteria | actinobacteria | 1680 | Bifidobacterium adolescentis | 98.98 | 126 |
| FBI00127 | Collinsella aerofaciens | bacteria | actinobacteria | 74426 | Collinsella aerofaciens | 98.81 | 127 |
| FBI00128 | Hungatella effluvii | bacteria | firmicutes | 1096246 | Hungatella effluvii | 98.71 | 128 |
| FBI00132 | Gordonibacter pamelaeae | bacteria | actinobacteria | 471189 | Gordonibacter pamelaeae | 99.48 | 132 |
| FBI00133 | Oxalobacter formigenes | bacteria | proteobacteria | 847 | Oxalobacter formigenes | 99.21 | 133 |
| FBI00135 | Bifidobacterium pseudocatenulatum | bacteria | actinobacteria | 28026 | Bifidobacterium pseudocatenulatum | 99.57 | 135 |
| FBI00137 | Bacteroides fragilis | bacteria | bacteroidetes | 817 | Bacteroides fragilis | 99.71 | 137 |
| FBI00140 | Phascolarctobacterium faecium | bacteria | firmicutes | 33025 | Phascolarctobacterium faecium | 99.58 | 140 |
| FBI00141 | Phascolarctobacterium faecium | bacteria | firmicutes | 33025 | Phascolarctobacterium faecium | 99.15 | 141 |
| FBI00145 | Bifidobacterium adolescentis | bacteria | actinobacteria | 1680 | Bifidobacterium adolescentis | 99.14 | 145 |
| FBI00147 | Clostridium bolteae | bacteria | firmicutes | 208479 | Clostridium bolteae | 99.28 | 147 |
| FBI00149 | Monoglobus pectinilyticus | bacteria | firmicutes | 1981510 | Monoglobus pectinilyticus | 99.5 | 149 |
| FBI00151 | Clostridium aldenense | bacteria | firmicutes | 358742 | Clostridium aldenense | 98.55 | 151 |
| FBI00152 | Dialister invisus | bacteria | firmicutes | 218538 | Dialister invisus | 99.58 | 152 |
| FBI00159 | Eisenbergiella tayi | bacteria | firmicutes | 1432052 | Eisenbergiella tayi | 99.03 | 159 |
| FBI00162 | Bifidobacterium catenulatum | bacteria | actinobacteria | 1686 | Bifidobacterium catenulatum | 99.14 | 162 |
| FBI00165 | Bacteroides massiliensis | bacteria | bacteroidetes | 204516 | Bacteroides massiliensis | 99.71 | 165 |
| FBI00167 | Dorea longicatena | bacteria | firmicutes | 88431 | Dorea longicatena | 99.39 | 167 |
| FBI00170 | Eggerthella lenta | bacteria | actinobacteria | 84112 | Eggerthella lenta | 98.61 | 170 |
| FBI00171 | Bilophila wadsworthia | bacteria | proteobacteria | 35833 | Desulfovibrio desulfuricans | 91.45 | 171 |
| FBI00174 | Lactobacillus rogosae | bacteria | firmicutes | 706562 | Lachnospira pectinoschiza | 97.92 | 174 |
| FBI00175 | Holdemanella biformis | bacteria | firmicutes | 1735 | Holdemanella biformis | 98.19 | 175 |
| FBI00176 | Ruthenibacterium lactatiformans | bacteria | firmicutes | 1550024 | Ruthenibacterium lactatiformans | 99.71 | 176 |
| FBI00289 | Oxalobacter formigenes | bacteria | proteobacteria | 847 | Oxalobacter formigenes | 99.21 | 289 |

TABLE 24

| | | | | | NCBI | |
|---|---|---|---|---|---|---|
| | | % Match | | | Taxonomy | SEQ ID |
| Strain # | Species: 16S Best-BLAST | (16S) | Kingdom | Phylum | ID | NO: X |
| FBI00002 | Bacteroides salyersiae | 99.5 | bacteria | bacteroidetes | 291644 | 2 |
| FBI00004 | Neglecta timonensis | 99.14 | bacteria | firmicutes | 1776382 | 4 |
| FBI00009 | Bifidobacterium faecale | 98.6 | bacteria | actinobacteria | 1454229 | 9 |
| FBI00010 | Blautia obeum | 98.12 | bacteria | firmicutes | 40520 | 10 |
| FBI00012 | Alistipes onderdonkii | 99.71 | bacteria | bacteroidetes | 328813 | 12 |
| FBI00013 | Parabacteroides merdae | 99.5 | bacteria | bacteroidetes | 46503 | 13 |
| FBI00015 | Bacteroides uniformis | 99.78 | bacteria | bacteroidetes | 820 | 15 |
| FBI00016 | Bifidobacterium pseudocatenulatum | 99.64 | bacteria | actinobacteria | 28026 | 16 |
| FBI00018 | Eubacterium rectale | 99.71 | bacteria | firmicutes | 39491 | 18 |
| FBI00019 | Alistipes timonensis | 99.78 | bacteria | bacteroidetes | 1465754 | 19 |
| FBI00021 | Bacteroides kribbi | 99.07 | bacteria | bacteroidetes | 1912894 | 21 |
| FBI00022 | Alistipes putredinis | 99.93 | bacteria | bacteroidetes | 28117 | 22 |
| FBI00029 | Parabacteroides distasonis | 99.26 | bacteria | bacteroidetes | 823 | 29 |
| FBI00032 | Anaerostipes hadrus | 99.64 | bacteria | firmicutes | 649756 | 32 |
| FBI00033 | Clostridium amygdalinum | 93.56 | bacteria | firmicutes | 31979 | 33 |
| FBI00034 | Eubacterium eligens | 98.78 | bacteria | firmicutes | 39485 | 34 |
| FBI00038 | Coprococcus eutactus | 95.96 | bacteria | firmicutes | 33043 | 38 |
| FBI00043 | Bifidobacterium dentium | 99.35 | bacteria | actinobacteria | 1689 | 43 |
| FBI00044 | Blautia wexlerae | 98.69 | bacteria | firmicutes | 418240 | 44 |
| FBI00046 | Bacteroides caccae | 99.71 | bacteria | bacteroidetes | 47678 | 46 |
| FBI00048 | Fusicatenibacter saccharivorans | 97.95 | bacteria | firmicutes | 1150298 | 48 |
| FBI00049 | Dialister succinatiphilus | 95.74 | bacteria | firmicutes | 487173 | 49 |
| FBI00050 | Bacteroides nordii | 98.63 | bacteria | bacteroidetes | 291645 | 50 |
| FBI00051 | Dorea formicigenerans | 98.07 | bacteria | firmicutes | 39486 | 51 |
| FBI00052 | Bacteroides xylanisolvens | 99.14 | bacteria | bacteroidetes | 28116 | 52 |
| FBI00056 | Clostridium citroniae | 99.2 | bacteria | firmicutes | 358743 | 56 |
| FBI00057 | Dorea longicatena | 99.7 | bacteria | firmicutes | 88431 | 57 |
| FBI00059 | Bacteroides oleiciplenus | 98.81 | bacteria | bacteroidetes | 626931 | 59 |
| FBI00060 | Bifidobacterium longum | 99.49 | bacteria | actinobacteria | 216816 | 60 |
| FBI00061 | Alistipes shahii | 99.19 | bacteria | bacteroidetes | 328814 | 61 |
| FBI00067 | Oxalobacter formigenes | 98.84 | bacteria | proteobacteria | 847 | 67 |
| FBI00068 | Akkermansia muciniphila | 99.42 | bacteria | verrucomicrobia | 239935 | 68 |
| FBI00069 | Ruminococcus bromii | 98.84 | bacteria | firmicutes | 40518 | 69 |
| FBI00070 | Bacteroides koreensis | 99.71 | bacteria | bacteroidetes | 1912896 | 70 |
| FBI00071 | Roseburia faecis | 94.92 | bacteria | firmicutes | 1732 | 71 |
| FBI00075 | Paraprevotella clara | 98.85 | bacteria | bacteroidetes | 454154 | 75 |
| FBI00076 | Bacteroides thetaiotaomicron | 99.78 | bacteria | bacteroidetes | 818 | 76 |
| FBI00079 | Clostridium clostridioforme | 99.14 | bacteria | firmicutes | 1531 | 79 |
| FBI00080 | Sutterella massiliensis | 99.78 | bacteria | proteobacteria | 1816689 | 80 |
| FBI00087 | Clostridium scindens | 98.28 | bacteria | firmicutes | 29347 | 87 |
| FBI00093 | Roseburia hominis | 99.71 | bacteria | firmicutes | 301301 | 93 |
| FBI00097 | Phocea massiliensis | 93.07 | bacteria | firmicutes | 1841867 | 97 |
| FBI00101 | Faecalibacterium prausnitzii | 97.97 | bacteria | firmicutes | 853 | 101 |
| FBI00102 | Clostridium symbiosum | 94.31 | bacteria | firmicutes | 1512 | 102 |
| FBI00104 | Blautia luti | 97.18 | bacteria | firmicutes | 418240 | 104 |
| FBI00109 | Coprococcus comes | 98.39 | bacteria | firmicutes | 410072 | 109 |
| FBI00117 | Blautia faecis | 99.52 | bacteria | firmicutes | 871665 | 117 |
| FBI00120 | Hungatella hathewayi | 98.78 | bacteria | firmicutes | 154046 | 120 |
| FBI00125 | Bacteroides stercoris | 99.64 | bacteria | bacteroidetes | 46506 | 125 |
| FBI00127 | Collinsella aerofaciens | 98.81 | bacteria | actinobacteria | 74426 | 127 |
| FBI00128 | Hungatella effluvii | 98.71 | bacteria | firmicutes | 1096246 | 128 |
| FBI00132 | Gordonibacter pamelaeae | 99.48 | bacteria | actinobacteria | 471189 | 132 |
| FBI00133 | Oxalobacter formigenes | 99.21 | bacteria | proteobacteria | 847 | 133 |
| FBI00137 | Bacteroides fragilis | 99.71 | bacteria | bacteroidetes | 817 | 137 |
| FBI00141 | Phascolarctobacterium faecium | 99.15 | bacteria | firmicutes | 33025 | 141 |
| FBI00145 | Bifidobacterium adolescentis | 99.14 | bacteria | actinobacteria | 1680 | 145 |
| FBI00149 | Monoglobus pectinilyticus | 99.5 | bacteria | firmicutes | 1981510 | 149 |
| FBI00151 | Clostridium aldenense | 98.55 | bacteria | firmicutes | 358742 | 151 |
| FBI00152 | Dialister invisus | 99.58 | bacteria | firmicutes | 218538 | 152 |
| FBI00162 | Bifidobacterium catenulatum | 99.14 | bacteria | actinobacteria | 1686 | 162 |
| FBI00165 | Bacteroides massiliensis | 99.71 | bacteria | bacteroidetes | 204516 | 165 |
| FBI00171 | Desulfovibrio desulfuricans | 91.45 | bacteria | proteobacteria | 876 | 171 |
| FBI00174 | Lachnospira pectinoschiza | 97.92 | bacteria | firmicutes | 28052 | 174 |
| FBI00176 | Ruthenibacterium lactatiformans | 99.71 | bacteria | firmicutes | 1550024 | 176 |
| FBI00177 | Parasutterella excrementihominis | 99.71 | bacteria | proteobacteria | 487175 | 177 |
| FBI00180 | Alistipes senegalensis | 97.56 | bacteria | bacteroidetes | 1288121 | 180 |
| FBI00182 | Bacteroides coprocola | 99.64 | bacteria | bacteroidetes | 310298 | 182 |
| FBI00184 | Bacteroides faecis | 99.78 | bacteria | bacteroidetes | 674529 | 184 |
| FBI00190 | Bacteroides finegoldii | 98.91 | bacteria | bacteroidetes | 338188 | 190 |
| FBI00191 | Clostridium swellfunianum | 96.24 | bacteria | firmicutes | 1367462 | 191 |
| FBI00194 | Ruminococcus faecis | 98.41 | bacteria | firmicutes | 592978 | 194 |
| FBI00197 | Bifidobacterium bifidum | 99.85 | bacteria | actinobacteria | 1681 | 197 |
| FBI00198 | Lachnoclostridium pacaense | 99.71 | bacteria | firmicutes | 1917870 | 198 |
| FBI00199 | Clostridium bolteae | 99.28 | bacteria | firmicutes | 208479 | 199 |
| FBI00200 | Longicatena caecimuris | 99.71 | bacteria | firmicutes | 1796635 | 200 |
| FBI00201 | Eggerthella lenta | 98.83 | bacteria | actinobacteria | 84112 | 201 |
| FBI00205 | Blautia luti | 97.55 | bacteria | firmicutes | 89014 | 205 |
| FBI00208 | Anaerotruncus colihominis | 96.52 | bacteria | firmicutes | 169435 | 208 |
| FBI00211 | Bacteroides vulgatus | 99.78 | bacteria | bacteroidetes | 821 | 211 |
| FBI00220 | Megasphaera massiliensis | 98.8 | bacteria | firmicutes | 1232428 | 220 |
| FBI00221 | Butyricimonas faecihominis | 98.61 | bacteria | bacteroidetes | 1472416 | 221 |
| FBI00224 | Sutterella wadsworthensis | 99.71 | bacteria | proteobacteria | 40545 | 224 |
| FBI00226 | Catabacter hongkongensis | 99.71 | bacteria | firmicutes | 270498 | 226 |
| FBI00233 | Anaerotruncus colihominis | 91.63 | bacteria | firmicutes | 474960 | 233 |
| FBI00236 | Eisenbergiella tayi | 99.41 | bacteria | firmicutes | 1432052 | 236 |
| FBI00237 | Dielma fastidiosa | 99.78 | bacteria | firmicutes | 1034346 | 237 |
| FBI00238 | Alistipes finegoldii | 95.84 | bacteria | bacteroidetes | 214856 | 238 |
| FBI00243 | Eubacterium siraeum | 98.53 | bacteria | firmicutes | 39492 | 243 |
| FBI00245 | Acidaminococcus intestini | 99.72 | bacteria | firmicutes | 187327 | 245 |
| FBI00248 | Emergencia timonensis | 99.64 | bacteria | firmicutes | 1776384 | 248 |
| FBI00254 | Eubacterium hallii | 99.08 | bacteria | firmicutes | 39488 | 254 |
| FBI00258 | Turicibacter sanguinis | 99.93 | bacteria | firmicutes | 154288 | 258 |
| FBI00267 | Anaerofustis stercorihominis | 97.29 | bacteria | firmicutes | 214853 | 267 |
| FBI00273 | Bamesiella intestinihominis | 99.43 | bacteria | bacteroidetes | 487174 | 273 |
| FBI00274 | Eubacterium xylanophilum | 93.5 | bacteria | firmicutes | 39497 | 274 |
| FBI00275 | Holdemanella biformis | 98.99 | bacteria | firmicutes | 1735 | 275 |
| FBI00278 | Eubacterium ventriosum | 94.14 | bacteria | firmicutes | 39496 | 278 |
| FBI00281 | Senegalimassilia anaerobia | 99.45 | bacteria | actinobacteria | 1473216 | 281 |
| FBI00282 | Porphyromonas asaccharolytica | 99.35 | bacteria | bacteroidetes | 28123 | 282 |
| FBI00288 | Blautia hydrogenotrophica | 99.57 | bacteria | firmicutes | 53443 | 288 |
| FBI00289 | Oxalobacter formigenes | 99.21 | bacteria | proteobacteria | 847 | 289 |
| FBI00290 | Eubacterium ruminantium | 94.81 | bacteria | firmicutes | 42322 | 290 |
| FBI00292 | Methanobrevibacter smithii | 99.44 | archaea | euryarchaeota | 2173 | 292 |
| FBI00377 | Christensenella massiliensis | 88.69 | bacteria | firmicutes | 186802 | 377 |

### Example 17: In Vivo Oxalate Reduction by a Therapeutic Microbial Consortium in Healthy Humans Treated with a High Oxalate/Low Calcium Diet

[0356] This study evaluates the ability of a rationally designed oxalate-degrading microbial consortium to reduce urinary oxalate levels in vivo in human subjects.

[0357] Approximately 64 healthy subjects are enrolled for the study. Six days prior to administration of the consortium, subjects are placed on a high oxalate/low calcium (HOLC) diet in order to create a temporary hyperoxaluric state akin to what is seen in enteric hyperoxaluria (Langman et al., 2016, “A double-blind, placebo controlled, randomized phase 1 cross-over study with ALLN-177, an orally administered oxalate degrading enzyme,” Am J Nephrol. 44(2):150-8). When administered to healthy subjects over 7 days, this diet has been previously shown to increase urinary oxalate from 27.2±9.5 mg/day during screening to 80.8±24.1 mg/day. This is well above the generally accepted upper limit of normal (40 mg/day) and clearly within the range seen in enteric hyperoxaluria.

[0358] Some subjects are additionally pre-treated with a course of broad spectrum antibiotics (a combination of metronidazole and clarithromycin) in order to pre-clear bacteria from the gut and facilitate subsequent engraftment of the heterologous community. This combination is selected based on the complementary coverage of gram-positive as well as gram-negative bacteria, broad coverage of obligate anaerobes (which dominate the microbial population in the GI tract) as well as facultative anaerobes, including enteric pathobionts (i.e. human commensals with pathogenic potential), and the relatively favorable safety and tolerability profiles of the constituent drugs. The goal of antibiotic pretreatment is to reduce pre-existing gastrointestinal bacterial load in an attempt to suppress colonization resistance, a microbially-mediated phenomenon that could limit the engraftment of strains in the consortium.

[0359] On Day 6 of administration of the HOLC diet and (optionally) the antibiotic pretreatment, some subjects are additionally given a polyethylene glycol (PEG) bowel preparation treatment, an approach commonly used in fecal matter transplant administration and that will be familiar to one skilled in the art. This treatment is designed to clear remaining antibiotics from the gastrointestinal tract and further reduce remaining bacterial load from the host.

[0360] Six days following administration of the HOLC diet, subjects are administered the therapeutic microbial consortium. The duration of treatment with the consortium or the placebo is 10 days. Urine oxalate excretion is used as a biomarker for treatment efficacy, and is monitored by LC-MS as described in Example 4. Stool samples are collected at all stages of the trial (including 1 month post-treatment) and used to monitor the composition of the microbiome by metagenomic sequencing. This facilitates monitoring the level and duration of engraftment of consortium strains.

[0361] Approximately 64 healthy human subjects are randomly assigned to one of the following five regimens in a 1:1:1:1 ratio:
[0362] a. Antibiotic pretreatment followed by bowel preparation with PEG followed by the treatment with the consortium.
[0363] b. Antibiotic pretreatment followed by treatment with the consortium.
[0364] c. Antibiotic placebo treatment followed by bowel preparation with PEG followed by treatment with the consortium.
[0365] d. Antibiotic pretreatment followed by treatment with a placebo.

[0366] Subjects are kept in confinement for two periods, separated by an approximately 20 day washout. The first confinement period is approximately 18 days, which includes antibiotic/antibiotic placebo pretreatment, followed by either a bowel preparation with PEG or no bowel preparation, followed by 10-day course of a therapeutic consortium or a placebo. The second confinement period is approximately 6 days. The sample size of this study was chosen to distinguish an approximately 20% change in in urinary oxalate levels between cohorts. This study enables evaluation of the ability of a therapeutic consortium to reduce levels of urine oxalate in a human subject. This study further evaluates the efficacy of the described pretreatment methods (antibiotic pretreatment and PEG preparation).

### Example 18: In Vivo Oxalate Reduction by a Therapeutic Microbial Consortium in Humans Patients with Enteric Hyperoxaluria

[0367] Enteric hyperoxaluria is characterized by excess absorption or consumption of dietary oxalate leading to increased renal oxalate excretion (>40 mg/day), recurrent kidney stones, renal calcium deposition (nephrocalcinosis) and, in severe cases, progressive renal impairment and end-stage renal failure (Liu and Nazzal, 2019, “Enteric hyperoxaluria: role of microbiota and antibiotics,” Curr Opin Nephrol Hypertens. 28(4):352-359; Ermer et al., 2016, “Oxalate, inflammasome, and progression of kidney disease,” Curr Opin Nephrol Hypertens. 25(4):363-71). Roux-en-Y Gastric Bypass (RYGB) surgery is a common comorbidity associated with enteric hyperoxaluria (˜60% of RYGB patients). This study evaluates the ability of an oxalate-degrading microbial consortium to reduce urinary oxalate levels in vivo in a cohort of up to approximately 16 Roux-en-Y Gastric Bypass (RYGB) patients with enteric hyperoxaluria.

[0368] A cohort of up to approximately 16 subjects is given an antibiotic pretreatment, a PEG bowel preparation treatment, and a 10-day treatment with a therapeutic microbial consortium as described in Example 17. Urine and stool samples are collected at different stages of the treatment to monitor urine oxalate levels and engraftment of consortium strains as described in Example 17. Stool samples are further collected after 30, 60, and 90 days to evaluate long-term engraftment of consortium strains by metagenomic sequencing. This study will demonstrate the ability of the consortium to reduce urinary oxalate levels in the RYGB patients.

### Example 19: Screening Strains for In Vitro Bile Acid Compound Metabolic Activity

[0369] in vitro metabolic screening is necessary to definitively characterize the ability of a microbial strain to degrade bile acid compounds. Strains are screened against a panel of bile acid compounds and structural conversion of the bile acids are evaluated as described. Briefly, overnight microbial monocultures are harvested by anaerobic centrifugation and resuspended in fresh pre-reduced growth medium (e.g. Mega Medium) spiked with 100 μM of bile acid (e.g. TCA, TCDCA, GCA, GCDCA, CA, CDCA, 3oxoCA, 7oxoCA, 12oxoCA, UDCA, DCA, LCA, 3oxoLCA) and allowed to incubate at 37° C. for 24 h. Cultures are sampled for bile acid analysis at 0, 6 and 24 h post-bile acid spike. For bile acid analysis, 2 ml of culture are sampled and immediately acidified with 50 μl of 6 N HCl to stop all metabolic activity and protonate bile acids to make them more soluble in organic solvent. Acidified cultures are extracted for bile acids and analyzed by LCMS (UPLC-QTOF or UPLC-QQQ).

[0370] Preliminary screening of commercial strains using TCA as the feeder molecule were obtained using this protocol, and the results are illustrated in FIG. 18.

### Example 20: Screening Strains for Resistance to Bile Acids

[0371] To determine the effect of the presence of bile acid on microbial strain growth, microbial cultures are grown in their respective banking medium (e.g. Mega Media or Chopped Meat Media) to saturation and back-diluted into the same respective banking medium containing a variable concentration of bile acids. % growth inhibition is calculated by determining the ratio of background-subtracted optical density (O.D.) of a microbial strain grown in the presence of bile acid to the O.D. of the same microbial strain grown in the absence of bile acid.

### Example 21: Murine Model of Chemically-Induced Primary Sclerosing Cholangitis and Microbiome-Induced Shift in Bile Acid Composition

[0372] This example describes the establishment of a chemically-induced murine model of primary sclerosing cholangitis (PSC) and demonstrates that alterations to a microbiome can alter the composition of the bile acid pool and affect disease severity.

[0373] On Day 0 of the experiment, germ-free 7-9 week-old germ-free C57B/6N female mice are weighed and colonized by oral gavage with one of two rationally-designed microbial consortia. One cohort of mice is colonized with a full microbial consortium that comprises a plurality of microbes including species having 7α-dehydroxylation activity and species having bile salt hydrolase (BSH) activity. A second cohort of mice is colonized with a partial microbial consortium which is identical in composition to the full consortium except that it lacks species having 7α-dehydroxylation activity. A control cohort of mice is treated with sterile saline.

[0374] The mice are fed for two weeks on a standard laboratory diet while the microbiome stabilizes. Beginning on Day 14 and for the following 14 days, the standard diet is supplemented either with 1% (w/w) hepatotoxic secondary bile acid LCA to induce PSC, or with an equimolar concentration of the conjugated bile acid GCDCA or the primary bile acid CDCA. GCDCA can be metabolized into CDCA by a population of microbes having BSH activity, and CDCA can be metabolized into LCA by a population of microbes having 7α-dehydroxylation activity.

[0375] On Days 0, 7, 14, 21, and 28, mice are monitored for indicators of chemically-induced PSC (e.g. reduced body weight, reduced food consumption, elevated liver enzyme levels) and fecal samples are collected. Fecal samples are analyzed by both LC/MS to determine the composition of the bile acid pool and by metagenomic sequencing to monitor microbial strain engraftment. Mice are euthanized on or before Day 28 and terminal samples are collected to enable screening for additional PSC indicators (e.g. changes to GI physiology, cecum bile acid composition).

[0376] Mice fed a diet supplemented with hepatotoxic LCA are expected to have elevated levels of fecal LCA and are expected to exhibit signs of PSC, thereby establishing a murine model of the disease. Mice colonized with the full set of microbes and fed a diet supplemented with GCDCA or CDCA are likewise expected to have elevated LCA content, as the upstream substrates can be metabolized into LCA by the engrafted set of microbes. Mice implanted with the partial set of microbes and fed a diet supplemented with conjugated bile acid are expected to not have LCA in their bile acid pool because the implanted microbial population lacks the activity necessary to metabolize the upstream substrates into LCA; these mice are accordingly expected to exhibit less severe signs of PSC. Taken together, these results will demonstrate that alterations to the microbiome can drive shifts in the bile acid pool in an animal and affect disease severity.

### Example 22: In Vivo Reduction of Hepatotoxic Bile Acids in a Mouse Model of PSC by Treatment with a Microbial Consortium

[0377] This example evaluates the ability of a bile-acid-metabolizing microbial consortium, comprising a plurality of active microbes and a supportive community of microbes, to alter the bile acid pool of an animal and affect disease severity. Said microbial consortium comprises a plurality of active microbes and a supportive community of microbes, wherein said plurality of active microbes comprises strains experimentally verified to have 3α-HSDH and/or 3β-HSDH activity, and said supportive community of microbes comprises strains experimentally verified to have 7α-HSDH activity, 7β-HSDH activity, and/or bile salt hydrolase activity.

[0378] To test the in vivo activity of a bile-acid-metabolizing microbial consortium described herein, germ-free C57B/6N female mice are weighed on Day 0 and colonized by oral gavage with either a plurality of active microbes alone, a supportive community alone, or a complete microbial consortium (actives and supportives). The mice are fed for two weeks on a standard laboratory diet while the microbiome stabilizes. Beginning on Day 14 and for the following 14 days, the standard diet is supplemented with the hepatotoxic secondary bile acid LCA (1% w/w) to induce PSC. Body weight, food weight, and fecal bile acid composition are monitored over the course of two weeks. After the two-week period, mice are sacrificed and a variety of terminal samples are collected including the cecum, feces, and serum.

[0379] Mice treated with the complete microbial consortium (actives and supportives) are expected to have reduced levels of hepatotoxic LCA and are expected to exhibit less severe signs of PSC relative to an untreated control (no microbial implantation). The mice treated with the active microbes alone are also expected to have lowered LCA levels relative to the untreated mice, but less so than the mice treated with the full consortium. The mice implanted with the supportive community only are not expected to have substantially lower LCA levels than the untreated mice. Taken together, these results will demonstrate the ability of a bile-acid-metabolizing microbial consortium to alter the pool of bile acids in an animal and consequently alleviate PSC symptoms.

1. A microbial consortium for administration to an animal, comprising:
a plurality of active microbes and an effective amount of a supportive community of microbes, wherein
the plurality of active microbes metabolize a first metabolic substrate to produce one or more than one metabolite, wherein the first metabolic substrate causes or contributes to disease in an animal, and
the supportive community of microbes comprises between 1 and 300 microbial strains,
wherein for the supportive community of microbes, at least one of the following four conditions is met:
1) the supportive community of microbes metabolizes one or more than one metabolite produced by the plurality of active microbes, wherein the one or more than one metabolite inhibits metabolism of the first metabolic substrate by one or more of the plurality of active microbes,
2) the supportive community of microbes increases the flux of a precursor of the first metabolic substrate into a biochemical pathway that converts said precursor into a metabolite that is not the first metabolic substrate,
3) the supportive community of microbes enhances one or more than one characteristic of the plurality of active microbes when administered to an animal selected from the group consisting of: a) gastrointestinal engraftment, b) biomass, c) first metabolic substrate metabolism, and d) longitudinal stability as compared to administration of the plurality of active microbes in the absence of the supportive community of microbes, and
4) the supportive community of microbes catalyzes one or more than one reaction selected from the group consisting of: fermentation of polysaccharides to one or more than one of the group consisting of acetate, acetoin, 2-oxoglutarate, propionate, 1,3-propanediol, succinate, ethanol, lactate, butyrate, 2,3-butanediol, acetone, butanol, formate, H₂, and CO₂, fermentation of amino acids to one or more than one of the group consisting of acetate, propionate, butanoate, butyrate, isobutyrate, 2-methylbutyrate, isovalerate, isocaproate, 3-phenylpropanoate, phloretate, 3-(1H-indol-3-yl)propanoate, 5-aminopentanoate, H₂, H₂S, and CO₂, synthesis of one or more than one of the group consisting of methane from H₂ and CO₂, methane from formate and H₂, acetate from H₂ and CO₂, acetate from formate and H₂, acetate and sulfide from H₂, CO₂, and sulfate, propionate and CO₂ from succinate, succinate from H₂ and fumarate; synthesis of succinate from formate and fumarate, and butyrate, acetate, H₂, and CO₂ from lactate, deconjugation of conjugated bile acids to produce primary bile acids, conversion of cholic acid (CA) to 7-oxocholic acid, conversion of 7-oxocholic acid to 7-beta-cholic acid (7betaCA), conversion of chenodeoxycholic acid (CDCA) to 7-oxochenodeoxycholic acid, and conversion of 7-oxochenodeoxycholic acid to ursodeoxycholic acid (UDCA).

2.-12. (canceled)

13. The microbial consortium of claim 1, wherein at least one of the two following conditions is met:
the first metabolic substrate metabolizing activity of at least one of the plurality of active microbes is significantly different when measured in a standardized substrate metabolization assay at two pH values within a range of 4 to 8, and wherein the difference between the two pH values is at least one pH unit, and
the first metabolic substrate metabolizing activity of at least one of the plurality of active microbes is significantly different when measured in a standardized substrate metabolization assay at two first metabolic substrate concentrations within a 100 fold range, and wherein the difference between the two first metabolic substrate concentrations is at least 1.2-fold.

14. The microbial consortium of claim 1, wherein the supportive community of microbes comprises at least three phyla selected from the group consisting of Bacteroidetes, Firmicutes, Actinobacteria, Proteobacteria, Verrucomicrobia, and Euryarchaeota.

15.-24. (canceled)

25. The microbial consortium of claim 1, wherein:
the plurality of active microbes comprises Oxalobacter formigenes;
the first metabolic substrate is oxalate;
the metabolite is (i) formate or (ii) formate and carbon dioxide; and
the supportive community of microbes catalyzes the synthesis of methane from formate and H₂.

26.-27. (canceled)

28. The microbial consortium of claim 25, wherein the supportive community of microbes comprises a Bacteroidetes and a Euryarchaeota.

29.-30. (canceled)

31. The microbial consortium of claim 25, wherein the supportive community of microbes comprises between 20 and 200 microbial strains and comprises at least 4 phyla selected from the group consisting of Bacteroidetes, Firmicutes, Actinobacteria, and Proteobacteria.

32.-33. (canceled)

34. The microbial consortium of claim 31, wherein the supportive community comprises:
(i) Ruminococcus bromii, Clostridium citroniae, Bacteroides salyersiae, Neglecta timonensis, Bifidobacterium longum, Bifidobacterium pseudocatenulatum, Bacteroides thetaiotaomicron, Eggerthella lenta, Clostridiaceae sp., Bifidobacterium dentium, Parabacteroides merdae, Bilophila wadsworthia, Bacteroides caccae, Dorea longicatena, Collinsella aerofaciens, Clostridium scindens, Faecalibacterium prausnitzii, Clostridium symbiosum, and Bacteroides vulgatus;
(ii) Acidaminococcus intestine, Akkermansia muciniphila, Alistipes onderdonkii, Alistipes putredinis, Alistipes senegalensis, Alistipes shahii, Alistipes sp., Alistipes timonensis, Anaerofustis stercorihominis, Anaerostipes hadrus, Anaerotruncus massiliensis, Bacteroides caccae, Bacteroides coprocola, Bacteroides faecis, Bacteroides finegoldii, Bacteroides fragilis, Bacteroides kribbi, Bacteroides massiliensis, Bacteroides nordii, Bacteroides ovatus, Bacteroides salyersiae, Bacteroides stercorirosoris, Bacteroides stercoris, Bacteroides thetaiotaomicron, Bacteroides uniformis, Bacteroides vulgatus, Bacteroides xylanisolvens, Barnesiella intestinihominis, Bifidobacterium adolescentis, Bifidobacterium bifidum, Bifidobacterium catenulatum, Bifidobacterium dentium, Bifidobacterium longum, Bifidobacterium pseudocatenulatum, Bilophila wadsworthia, Blautia faecis, Blautia hydrogenotrophica, Blautia massiliensis, Blautia obeum, Blautia wexlerae, Butyricimonas faecihominis, Catabacter hongkongensis, Clostridiaceae sp., Clostridiales sp., Clostridium aldenense, Clostridium bolteae, Clostridium citroniae, Clostridium clostridioforme, Clostridium fessum, Clostridium scindens, Collinsella aerofaciens, Coprococcus comes, Coprococcus eutactus, Dialister invisus, Dialister succinatiphilus, Dielma fastidiosa, Dorea formicigenerans, Dorea longicatena, Eggerthella lenta, Eisenbergiella tayi, Eubacterium eligens, Eubacterium hallii, Eubacterium rectale, Eubacterium siraeum, Eubacterium ventriosum, Eubacterium xylanophilum, Faecalibacterium prausnitzii, Fusicatenibacter saccharivorans, Gordonibacter pamelaeae, Holdemanella biformis, Hungatella effluvia, Lachnoclostridium pacaense, Lachnospiraceae sp., Lactobacillus rogosae, Longicatena caecimuris, Megasphaera massiliensis, Methanobrevibacter smithii, Monoglobus pectinilyticus, Neglecta timonensis, Parabacteroides distasonis, Parabacteroides merdae, Paraprevotella clara, Parasutterella excrementihominis, Phascolarctobacterium faecium, Porphyromonas asaccharolytica, Roseburia hominis, Ruminococcaceae sp., Ruminococcus bromii, Ruminococcus faecis, Ruthenibacterium lactatiformans, Senegalimassilia anaerobia, Sutterella massiliensis, Sutterella wadsworthensis, and Turicibacter sanguinis; or
(iii) Akkermansia muciniphila, Alistipes onderdonkii, Alistipes putredinis, Alistipes shahii, Alistipes timonensis, Anaerostipes hadrus, Bacteroides caccae, Bacteroides fragilis, Bacteroides kribbi, Bacteroides koreensis, Bacteroides massiliensis, Bacteroides nordii, Bacteroides salyersiae, Bacteroides stercorirosoris, Bacteroides stercoris, Bacteroides thetaiotaomicron, Bacteroides uniformis, Bacteroides vulgatus, Bacteroides xylanisolvens, Bifidobacterium adolescentis, Bifidobacterium catenulatum, Bifidobacterium dentium, Bifidobacterium longum, Bifidobacterium pseudocatenulatum, Bilophila wadsworthia, Bilophila wadsworthia, Blautia faecis, Blautia obeum, Blautia wexlerae, Clostridium aldenense, Clostridium bolteae, Clostridium citroniae, Clostridium clostridioforme, Clostridium fessum, Clostridium scindens, Collinsella aerofaciens, Coprococcus comes, Coprococcus eutactus, Dialister invisus, Dialister succinatiphilus, Dorea formicigenerans, Dorea longicatena, Eggerthella lenta, Eisenbergiella tayi, Eubacterium eligens, Eubacterium rectale, Faecalibacterium prausnitzii, Fusicatenibacter saccharivorans, Gordonibacter pamelaeae, Holdemanella biformis, Hungatella effluvia, Lachnoclostridium pacaense, Lachnospiraceae sp., Lactobacillus rogosae, Monoglobus pectinilyticus, Neglecta timonensis, Parabacteroides distasonis, Parabacteroides merdae, Paraprevotella clara, Parasutterella excrementihominis, Phascolarctobacterium faecium, Porphyromonas asaccharolytica, Roseburia hominis, Ruminococcaceae sp., Ruminococcus bromii, Ruminococcus faecis, Ruthenibacterium lactatiformans, Sutterella massiliensis, and Sutterella wadsworthensis.

35.-45. (canceled)

46. The microbial consortium of claim 1, wherein the plurality of active microbes and the supportive community of microbes are selected from a group of microbes each comprising a 16S sequence at least 97% identical to any one of the microbes listed in Table 4, Table 22, Table 23, Table 20, Table 16, Table 17, Table 18 or Table 19.

47.-61. (canceled)

62. The microbial consortium of claim 1, wherein at least one of the plurality of active microbes has a higher first metabolic substrate metabolizing activity at
(A) a lower pH compared to:
(i) at least one other of the plurality of active microbes at the same lower pH; or
(ii) a first metabolic substrate metabolizing activity of the same active microbe at a higher pH,
wherein the lower pH is at 4.5±0.5, or
(B) a higher pH compared to:
(i) at least one other of the plurality of active microbes at the same higher pH; or
(ii) a first metabolic substrate activity of the same active microbe at a lower pH,
wherein the higher pH is at 7.5±0.5.

63.-67. (canceled)

68. The microbial consortium of claim 1, wherein at least one of the plurality of active microbes has a higher first metabolic substrate metabolizing activity at a lower pH and one of the plurality of active microbes has a higher first metabolic substrate metabolizing activity at a higher pH, wherein the difference between the two pH values is at least 1.5, 2.0, 2.5, 3.0, 3.5, or 4.0 pH units.

69. (canceled)

70. The microbial consortium of claim 1, wherein at least one of the plurality of active microbes has a higher first metabolic substrate metabolizing activity at
(A) a lower concentration of first metabolic substrate compared to:
(i) the first metabolic substrate activity of at least one other of the plurality of active microbes when measured in a standardized substrate metabolization assay under the same conditions; or
(ii) a first metabolic substrate metabolizing activity of the same active microbe at a higher concentration of first metabolic substrate, or
(B) a higher concentration of first metabolic substrate compared to:
(i) the first metabolic substrate activity of at least one other of the plurality of active microbes when measured in a standardized substrate metabolization assay under the same conditions; or
(ii) a first metabolic substrate metabolizing activity of the same active microbe at a lower concentration of first metabolic substrate.

71.-73. (canceled)

74. The microbial consortium of claim 1, wherein at least one of the plurality of active microbes has a higher first metabolic substrate metabolizing activity at a lower first metabolic substrate concentration and one of the plurality of active microbes has a higher first metabolic substrate metabolizing activity at a higher first metabolic substrate concentration, and wherein the difference between the two first metabolic substrate concentrations is at least 1.2 fold, 2.0 fold, 3.0 fold, 4.0 fold, 5.0 fold, 6.0 fold, 7.0 fold, 8.0 fold, 9.0 fold, 10 fold, 20 fold, 30 fold, 40 fold, 50 fold, 60 fold, 70 fold, 80 fold, 90 fold, or 100 fold.

75.-77. (canceled)

78. The microbial consortium of claim 25, wherein at least one of the plurality of active microbes has a higher oxalate metabolizing activity
(A) at 0.75 mM of oxalate compared to:
(i) the oxalate metabolizing activity of at least one other of the plurality of active microbes when measured in a standardized oxalate metabolization assay under the same conditions; or
(ii) an oxalate metabolizing activity of the same active microbe at a higher concentration of oxalate, or
(B) at 40 mM of oxalate compared to:
(i) the oxalate metabolizing activity of at least one other of the plurality of active microbes when measured in a standardized oxalate metabolization assay under the same conditions; or
(ii) an oxalate metabolizing activity of the same active microbe at a lower concentration of oxalate.

79.-82. (canceled)

83. The microbial consortium of claim 78, wherein the standardized substrate metabolization assay comprises using:
(A) a colorimetric enzyme assay that measures the activity of oxalate oxidase in a culture sample comprising the microbial consortium, wherein the culture sample comprises three or more microbial strains in an appropriate culture media incubated for 1 hour to 96 hours in the presence of oxalate at a concentration of 0.5 mM to 50 mM, at a pH of 3.5 to 8.0, and at a temperature of 35° C. to 40° C.; or
(B) liquid chromatography-tandem mass spectrometry (LC-MS/MS) to measure the amount of oxalate in a culture sample comprising the microbial consortium, wherein the culture sample comprises three or more microbial strains in an appropriate culture media incubated for 1 hour to 96 hours in the presence of oxalate at a concentration of 0.5 mM to 50 mM, at a pH of 3.5 to 8.0, and at a temperature of 35° C. to 40° C.

84. (canceled)

85. The microbial consortium of claim 25, wherein the consortium further comprises:
a fermenting microbe that metabolizes a fermentation substrate to one or more than one fermentation product; and
a synthesizing microbe that catalyzes a synthesis reaction that combines the one or more than one metabolite and the one or more than one fermentation product to generate one or more than one synthesis product,
wherein the fermentation substrate is
(A) a polysaccharide and the one or more than one fermentation product is selected from the group consisting of acetate, acetoin, 2-oxoglutarate, propionate, 1,3-propanediol, succinate, ethanol, lactate, butyrate, 2,3-butanediol, acetone, butanol, formate, hydrogen gas, and carbon dioxide, or
(B) an amino acid and the one or more than one fermentation product is selected from the group consisting of acetate, propionate, butanoate, butyrate, isobutyrate, 2-methylbutyrate, isovalerate, isocaproate, 3-phenylpropanoate, phloretate, 3-(1H-indol-3-yl)propanoate, 5-aminopentanoate, hydrogen gas, hydrogen sulfide, and carbon dioxide, and
wherein the reaction catalyzed by the synthesizing microbe is selected from the group consisting of: synthesis of methane from carbon dioxide and hydrogen gas; synthesis of methane from H₂ and CO₂, methane from formate and H₂, acetate from H₂ and CO₂, acetate from formate and H₂, acetate and sulfide from H₂, CO₂, and sulfate, propionate and CO₂ from succinate, succinate from H₂ and fumarate; synthesis of succinate from formate and fumarate, and butyrate, acetate, H₂, and CO₂ from lactate.

86. The microbial consortium of claim 85, wherein the one or more than one fermentation product is a second metabolic substrate for the plurality of active microbes or a third metabolic substrate for the synthesizing microbe.

87. The microbial consortium of claim 85, wherein the one or more than one synthesis product is a second metabolic substrate for the plurality of active microbes or a fourth metabolic substrate for the fermenting microbe.

88.-90. (canceled)

91. The microbial consortium of claim 85, wherein the microbial consortium, when administered to an animal on a high oxalate diet, significantly reduces oxalate concentration in a sample selected from the group consisting of blood, serum, stool, or urine, as compared to a sample collected from a corresponding control animal on a high oxalate diet that has not been administered with the microbial consortium.

92.-114. (canceled)

115. The microbial consortium of claim 1, wherein the first metabolic substrate is a primary bile acid selected from the group consisting of lithocholic acid (LCA), and deoxycholic acid (DCA), and
the one or more than one metabolite is selected from the group consisting of iso-lithocholic acid (iso-LCA), or iso-deoxycholic acid (iso-DCA).

116.-117. (canceled)

118. The microbial consortium claim 115, wherein the supportive community of microbes enhances the conversion of:
(i) one or more conjugated bile acids selected from the group consisting of taurochenodeoxycholic acid (TCDCA), glycochenodeoxycholic acid (GCDCA), taurocholic acid (TCA), and glycocholic acid (GCA), to cholic acid (CA) or chenodeoxycholic acid (CDCA);
(ii) CA to 7-beta-cholic acid (7betaCA); or
(iii) CDCA to ursodeoxycholic acid (UDCA).

119.-120. (canceled)

121. The microbial consortium of claim 115, wherein at least one of the plurality of active microbes has a higher bile acid metabolization activity
(A) at a bile acid concentration of 0.1 mM compared to:
(i) the bile acid metabolization activity of at least one other of the plurality of active microbes when measured in a standardized bile acid metabolization assay under the same conditions; or
(ii) a bile acid metabolizing activity of the same active microbe at a higher bile acid concentration, or
(B) at a bile acid concentration of 10 mM compared to:
(i) the bile acid metabolization activity of at least one other of the plurality of active microbes when measured in a standardized bile acid metabolization assay under the same conditions; or
(ii) a bile acid metabolizing activity of the same active microbe at a lower bile acid concentration.

122.-125. (canceled)

126. The microbial consortium of claim 115, wherein the standardized substrate metabolization assay comprises using liquid chromatography-mass spectrometry to determine the bile acid profile in a culture sample comprising the microbial consortium, wherein the culture sample comprises three or more microbial strains in an appropriate culture media incubated for 1 hour to 96 hours in the presence of bile acids at a concentration of 0.1 mM to 10 mM, at a pH of 3.5 to 8.0, and at a temperature of 35° C. to 40° C.

127. The microbial consortium of claim 115, wherein the plurality of active microbes comprises one or more microbial phyla selected from Firmicutes and Actinobacteria, one or more microbial strain selected from Eggerthella lenta and Clostridium scindens; and
the supportive community of microbes comprises 20 to 200 microbial strains.

128.-134. (canceled)

135. The microbial consortium of claim 1, wherein the microbial consortium, when administered to the animal, decreases a concentration of the first metabolic substrate in the animal.

136. (canceled)

137. A pharmaceutical composition comprising the microbial consortium of claim 1 and a pharmaceutically acceptable carrier or excipient.

138. A method of treating a subject diagnosed with or at risk for a metabolic disease or condition selected from the group consisting of primary hyperoxaluria, secondary hyperoxaluria, primary sclerosing cholangitis, primary biliary cholangitis, progressive familial intrahepatic cholestasis, nonalcoholic steatohepatitis, and multiple sclerosis, the method comprising administering to the subject, the pharmaceutical composition of claim 137,
wherein administration of the pharmaceutical composition reduces levels of the first metabolic substrate in the subject by at least 20% as compared to an untreated control subject or as compared to pre-administration levels of the first metabolic substrate in the subject.

139.-145. (canceled)

146. A supportive community of microbes comprising between 1 and 300 microbial strains, wherein at least one of the following four conditions is met:
1) the supportive community of microbes metabolizes one or more than one metabolite produced by a plurality of active microbes, wherein the one or more than one metabolite inhibits metabolism of a first metabolic substrate by one or more of the plurality of active microbes, wherein the first metabolic substrate causes or contributes to a disease in an animal,
2) the supportive community of microbes increases the flux of a precursor of the first metabolic substrate into a biochemical pathway that converts said precursor into a metabolite that is not the first metabolic substrate,
3) the supportive community of microbes enhances one or more than one characteristic of the plurality of active microbes when administered to an animal selected from the group consisting of: a) gastrointestinal engraftment, b) biomass, c) first metabolic substrate metabolism, and d) longitudinal stability as compared to administration of the plurality of active microbes in the absence of the supportive community of microbes, and
4) the supportive community of microbes catalyzes one or more than one reaction selected from the group consisting of: fermentation of polysaccharides to one or more than one of the group consisting of acetate, acetoin, 2-oxoglutarate, propionate, 1,3-propanediol, succinate, ethanol, lactate, butyrate, 2,3-butanediol, acetone, butanol, formate, H₂, and CO₂, fermentation of amino acids to one or more than one of the group consisting of acetate, propionate, butanoate, butyrate, isobutyrate, 2-methylbutyrate, isovalerate, isocaproate, 3-phenylpropanoate, phloretate, 3-(1H-indol-3-yl)propanoate, 5-aminopentanoate, H₂, H₂S, and CO₂, synthesis of one or more than one of the group consisting of methane from H₂ and CO₂, methane from formate and H₂, acetate from H₂ and CO₂, acetate from formate and H₂, acetate and sulfide from H₂, CO₂, and sulfate, propionate and CO₂ from succinate, succinate from H₂ and fumarate; synthesis of succinate from formate and fumarate, and butyrate, acetate, H₂, and CO₂ from lactate, deconjugation of conjugated bile acids to produce primary bile acids, conversion of cholic acid (CA) to 7-oxocholic acid, conversion of 7-oxocholic acid to 7-beta-cholic acid (7betaCA), conversion of chenodeoxycholic acid (CDCA) to 7-oxochenodeoxycholic acid, and conversion of 7-oxochenodeoxycholic acid to ursodeoxycholic acid (UDCA).

147. (canceled)

148. The supportive community of claim 146, wherein the supportive community comprises at least 4 phyla selected from the group consisting of Bacteroidetes, Firmicutes, Actinobacteria, and Proteobacteria.

149. (canceled)

150. The supportive community of claim 148, wherein the supportive community comprises:
(i) Ruminococcus bromii, Clostridium citroniae, Bacteroides salyersiae, Neglecta timonensis, Bifidobacterium longum, Bifidobacterium pseudocatenulatum, Bacteroides thetaiotaomicron, Eggerthella lenta, Clostridiaceae sp., Bifidobacterium dentium, Parabacteroides merdae, Bilophila wadsworthia, Bacteroides caccae, Dorea longicatena, Collinsella aerofaciens, Clostridium scindens, Faecalibacterium prausnitzii, Clostridium symbiosum, and Bacteroides vulgatus;
(ii) Acidaminococcus intestine, Akkermansia muciniphila, Alistipes onderdonkii, Alistipes putredinis, Alistipes senegalensis, Alistipes shahii, Alistipes sp., Alistipes timonensis, Anaerofustis stercorihominis, Anaerostipes hadrus, Anaerotruncus massiliensis, Bacteroides caccae, Bacteroides coprocola, Bacteroides faecis, Bacteroides finegoldii, Bacteroides fragilis, Bacteroides kribbi, Bacteroides massiliensis, Bacteroides nordii, Bacteroides ovatus, Bacteroides salyersiae, Bacteroides stercorirosoris, Bacteroides stercoris, Bacteroides thetaiotaomicron, Bacteroides uniformis, Bacteroides vulgatus, Bacteroides xylanisolvens, Barnesiella intestinihominis, Bifidobacterium adolescentis, Bifidobacterium bifidum, Bifidobacterium catenulatum, Bifidobacterium dentium, Bifidobacterium longum, Bifidobacterium pseudocatenulatum, Bilophila wadsworthia, Blautia faecis, Blautia hydrogenotrophica, Blautia massiliensis, Blautia obeum, Blautia wexlerae, Butyricimonas faecihominis, Catabacter hongkongensis, Clostridiaceae sp., Clostridiales sp., Clostridium aldenense, Clostridium bolteae, Clostridium citroniae, Clostridium clostridioforme, Clostridium fessum, Clostridium scindens, Collinsella aerofaciens, Coprococcus comes, Coprococcus eutactus, Dialister invisus, Dialister succinatiphilus, Dielma fastidiosa, Dorea formicigenerans, Dorea longicatena, Eggerthella lenta, Eisenbergiella tayi, Eubacterium eligens, Eubacterium hallii, Eubacterium rectale, Eubacterium siraeum, Eubacterium ventriosum, Eubacterium xylanophilum, Faecalibacterium prausnitzii, Fusicatenibacter saccharivorans, Gordonibacter pamelaeae, Holdemanella biformis, Hungatella effluvia, Lachnoclostridium pacaense, Lachnospiraceae sp., Lactobacillus rogosae, Longicatena caecimuris, Megasphaera massiliensis, Methanobrevibacter smithii, Monoglobus pectinilyticus, Neglecta timonensis, Parabacteroides distasonis, Parabacteroides merdae, Paraprevotella clara, Parasutterella excrementihominis, Phascolarctobacterium faecium, Porphyromonas asaccharolytica, Roseburia hominis, Ruminococcaceae sp., Ruminococcus bromii, Ruminococcus faecis, Ruthenibacterium lactatiformans, Senegalimassilia anaerobia, Sutterella massiliensis, Sutterella wadsworthensis, and Turicibacter sanguines; or
(iii) Akkermansia muciniphila, Alistipes onderdonkii, Alistipes putredinis, Alistipes shahii, Alistipes timonensis, Anaerostipes hadrus, Bacteroides caccae, Bacteroides Bacteroides kribbi, Bacteroides koreensis, Bacteroides massiliensis, Bacteroides nordii, Bacteroides salyersiae, Bacteroides stercorirosoris, Bacteroides stercoris, Bacteroides thetaiotaomicron, Bacteroides uniformis, Bacteroides vulgatus, Bacteroides xylanisolvens, Bifidobacterium adolescentis, Bifidobacterium catenulatum, Bifidobacterium dentium, Bifidobacterium longum, Bifidobacterium pseudocatenulatum, Bilophila wadsworthia, Bilophila wadsworthia, Blautia faecis, Blautia obeum, Blautia wexlerae, Clostridium aldenense, Clostridium bolteae, Clostridium citroniae, Clostridium clostridioforme, Clostridium fessum, Clostridium scindens, Collinsella aerofaciens, Coprococcus comes, Coprococcus eutactus, Dialister invisus, Dialister succinatiphilus, Dorea formicigenerans, Dorea longicatena, Eggerthella lenta, Eisenbergiella tayi, Eubacterium eligens, Eubacterium rectale, Faecalibacterium prausnitzii, Fusicatenibacter saccharivorans, Gordonibacter pamelaeae, Holdemanella biformis, Hungatella effluvia, Lachnoclostridium pacaense, Lachnospiraceae sp., Lactobacillus rogosae, Monoglobus pectinilyticus, Neglecta timonensis, Parabacteroides distasonis, Parabacteroides merdae, Paraprevotella clara, Parasutterella excrementihominis, Phascolarctobacterium faecium, Porphyromonas asaccharolytica, Roseburia hominis, Ruminococcaceae sp., Ruminococcus bromii, Ruminococcus faecis, Ruthenibacterium lactatiformans, Sutterella massiliensis, and Sutterella wadsworthensis.

151.-156. (canceled)

The application's sequence listing, which the Patent Office published only in electronic form, follows.

SEQUENCE LISTING (377 sequences)

SEQ ID NO: 1 - DNA, 1393 bp, Clostridium citroniae
  modified_base (8)..(8): a, c, t, g, unknown or other
  modified_base (28)..(28): a, c, t, g, unknown or other
gcagtcgnacgaagcaatcagaatgaanttttcggatggatttctggttgactgagtggcggacgggtgagtaacgcgtggataacctgcctcacactgggggataacagttagaaatggctgctaataccgcataagcgcacagtaccgcatggtacggtgtgaaaaactccggtggtgtgagatggatccgcgtctgattagttagttggcggggtaacggcccaccaagacagcgatcagtagccgacctgagagggtgaccggccacattgggactgagacacggcccaaactcctacgggaggcagcagtggggaatattgcacaatgggcgaaagcctgatgcagcgacgccgcgtgagtgaagaagtatttcggtatgtaaagctctatcagcagggaagaaaatgacggtacctgactaagaagccccggctaactacgtgccagcagccgcggtaatacgtagggggcaagcgttatccggatttactgggtgtaaagggagcgtagacggcgaagcaagtctggagtgaaaacccagggctcaaccctgggactgctttggaaactgttttgctagagtgtcggagaggtaagtggaattcctagtgtagcggtgaaatgcgtagatattaggaggaacaccagtggcgaaggcggcttactggacgataactgacgttgaggctcgaaagcgtggggagcaaacaggattagataccctggtagtccacgccgtaaacgatgaatgctaggtgttggggggcaaagcccttcggtgccgtcgcaaacgcaataagcattccacctggggagtacgttcgcaagaatgaaactcaaaggaattgacggggacccgcacaagcggtggagcatgtggtttaattcgaagcaacgcgaagaaccttaccaagtcttgacatccccctgaccggtcagtaaagtgacctttccttcgggacaggggagacaggtggtgcatggttgtcgtcagctcgtgtcgtgagatgttgggttaagtcccgcaacgagcgcaacccttatccttagtagccagcaggtaaagctgggcactctagggagactgccagggataacctggaggaaggtggggatgacgtcaaatcatcatgccccttatgatttgggctacacacgtgctacaatggcgtaaacaaagggaagcgaccctgcgaaggcaagcaaatcccaaaaataacgtcccagttcggactgtagtctgcaacccgactacacgaagctggaatcgctagtaatcgcgaatcagaatgtcgcggtgaatacgttcccgggtcttgtacacaccgcccgtcacaccatgggagtcagcaacgcccgaagtcaagtgacccaaccgaaaggaggg

SEQ ID NO: 2 - DNA, 1397 bp, Bacteroides salyersiae
  modified_base (2)..(3): a, c, t, g, unknown or other
  modified_base (5)..(5): a, c, t, g, unknown or other
  modified_base (20)..(20): a, c, t, g, unknown or other
  modified_base (24)..(25): a, c, t, g, unknown or other
  modified_base (1371)..(1372): a, c, t, g, unknown or other
  modified_base (1395)..(1396): a, c, t, g, unknown or other
anncntgcaagtcgaggggnagcnnggtgtagcaatacaccgcgtggcgaccggcgcacgggtgagtaacacgtatccaacctgccctttactcggggatagcctttcgaaagaaagattaatacccgatggtataacatgacctcctggttttgttattaaagaatttcggtagaggatggggatgcgttccattaggcagttggcggggtaacggcccaccaaaccttcgatggataggggttctgagaggaaggtcccccacattggaactgagacacggtccaaactcctacgggaggcagcagtgaggaatattggtcaatgggcgagagcctgaaccagccaagtagcgtgaaggatgaccgccctatgggttgtaaacttcttttatatgggaataaagggtgccacgtgtggcattttgtatgtaccatatgaataaggatcggctaactccgtgccagcagccgcggtaatacggaggatccgagcgttatccggatttattgggtttaaagggagcgtaggtggacatgtaagtcagttgtgaaagtttgcggctcaaccgtaaaattgcagttgatactgcgtgtcttgagtacagtagaggtgggcggaattcgtggtgtagcggtgaaatgcttagatatcacgaagaactccgattgcgaaggcagctcactggactgcaactgacactgatgctcgaaagtgtgggtatcaaacaggattagataccctggtagtccacacagtaaacgatgaatactcgctgtttgcgatatacagtaagcggccaagcgaaagcattaagtattccacctggggagtacgccggcaacggtgaaactcaaaggaattgacgggggcccgcacaagcggaggaacatgtggtttaattcgatgatacgcgaggaaccttacccgggcttaaattgcaaatgaatatgccggaaacggcatagccgcaaggcatttgtgaaggtgctgcatggttgtcgtcagctcgtgccgtgaggtgtcggcttaagtgccataacgagcgcaacccttatcttcagttactaacaggttatgctgaggactctggagagactgccgtcgtaagatgtgaggaaggtggggatgacgtcaaatcagcacggcccttacgtccggggctacacacgtgttacaatggggggtacagaaggccgctacacagcgatgtgatgccaatccctaaagcccctctcagttcggatcgaagtctgcaacccgacttcgtgaagctggattcgctagtaatcgcgcatcagccacggcgcggtgaatacgttcccgggccttgtacacaccgcccgtcaagccatgggagccgggggtacnngaagtacgtaaccgcaaggagcnnc

SEQ ID NO: 3 - DNA, 1413 bp, Enterococcus faecalis
  modified_base (4)..(5): a, c, t, g, unknown or other
  modified_base (21)..(21): a, c, t, g, unknown or other
tgcnngtcgaacgcttctttnctcccgagtgcttgcactcaattggaaagaggagtggcggacgggtgagtaacacgtgggtaacctacccatcagagggggataacacttggaaacaggtgctaataccgcataacagtttatgccgcatggcataagagtgaaaggcgctttcgggtgtcgctgatggatggacccgcggtgcattagctagttggtgaggtaacggctcaccaaggccacgatgcatagccgacctgagagggtgatcggccacactgggactgagacacggcccagactcctacgggaggcagcagtagggaatcttcggcaatggacgaaagtctgaccgagcaacgccgcgtgagtgaagaaggttttcggatcgtaaaactctgttgttagagaagaacaaggacgttagtaactgaacgtcccctgacggtatctaaccagaaagccacggctaactacgtgccagcagccgcggtaatacgtaggtggcaagcgttgtccggatttattgggcgtaaagcgagcgcaggcggtttcttaagtctgatgtgaaagcccccggctcaaccggggagggtcattggaaactgggagacttgagtgcagaagaggagagtggaattccatgtgtagcggtgaaatgcgtagatatatggaggaacaccagtggcgaaggcggctctctggtctgtaactgacgctgaggctcgaaagcgtggggagcaaacaggattagataccctggtagtccacgccgtaaacgatgagtgctaagtgttggagggtttccgcccttcagtgctgcagcaaacgcattaagcactccgcctggggagtacgaccgcaaggttgaaactcaaaggaattgacgggggcccgcacaagcggtggagcatgtggtttaattcgaagcaacgcgaagaaccttaccaggtcttgacatcctttgaccactctagagatagagctttcccttcggggacaaagtgacaggtggtgcatggttgtcgtcagctcgtgtcgtgagatgttgggttaagtcccgcaacgagcgcaacccttattgttagttgccatcatttagttgggcactctagcgagactgccggtgacaaaccggaggaaggtggggatgacgtcaaatcatcatgccccttatgacctgggctacacacgtgctacaatgggaagtacaacgagtcgctagaccgcgaggtcatgcaaatctcttaaagcttctctcagttcggattgcaggctgcaactcgcctgcatgaagccggaatcgctagtaatcgcggatcagcacgccgcggtgaatacgttcccgggccttgtacacaccgcccgtcacaccacgagagtttgtaacacccgaagtcggtgaggtaacct

SEQ ID NO: 4 - DNA, 1404 bp, Unknown
  Description of Unknown: Neglecta timonensis sequence
  modified_base (3)..(6): a, c, t, g, unknown or other
  modified_base (683)..(683): a, c, t, g, unknown or other
  modified_base (688)..(688): a, c, t, g, unknown or other
  modified_base (783)..(783): a, c, t, g, unknown or other
  modified_base (838)..(838): a, c, t, g, unknown or other
  modified_base (916)..(916): a, c, t, g, unknown or other
  modified_base (932)..(932): a, c, t, g, unknown or other
tannnntgcagtcgaacggagatagacgctgaaagggagacagcttgctgtaagaatttcttgtttatcttagtggcggacgggtgagtaacgcgtgagtaacctgcctttcagagggggataacgtctggaaacggacgctaataccgcatgagaccacagcttcacatggagcggcggtcaaaggagcaatccgctgaaagatggactcgcgtccgattagatagttggcggggtaacggcccaccaagtcgacgatcggtagccggactgagaggttgaacggccacattgggactgagacacggcccagactcctacgggaggcagcagtgagggatattggtcaatgggggaaaccctgaaccagcaacgccgcgtgagggaagacggttttcggattgtaaacctctgtcctctgtgaagatagtgacggtagcagaggaggaagctccggctaactacgtgccagcagccgcggtaatacgtagggagcgagcgttgtccggatttactgggtgtaaagggtgcgtaggcggctctgcaagtcagaagtgaaatccatgggcttaacccatgaactgcttttgaaaactgtagagcttgagtgaagtagaggtaggcggaattcccggtgtagcggtgaaatgcgtagagatcgggaggaacaccagtgggcgaanggcgnctactgggctttaactgacgctgagcacgaaagcatgggtagcaaacaggattagataccctggtagtccatgccgtaaacgatgattactaggntgtgggggggtctgaccccctccgtgccggagttaacacaataagtaatccaccnggggagtacgaccgcaaggttgaaactcaaaggaattgacgggggcccgcacaagcagtggagtatgtggattaattngaagcaacgcgaaganccttaccaggtcttgacatccaactaacgaagcagagatgcattaggtgcccttcggggaaagttgagacaggtggtgcatggttgtcgtcagctcgtgtcgtgagatgttgggttaagtcccgcaacgagcgcaacccttactgttagttgctacgcaagagcactctagcaggactgccgttgacaaaacggaggaaggtggggacgacgtcaaatcatcatgccccttatgacctgggcctcacacgtactacaatggccattaacagagggaagcaagcccgcgaggtggagcaaaaccctaaaaatggtctcagttcggatcgtaggctgaaacccgcctgcgtgaagttggaattgctagtaatcgcggatcagcatgccgcggtgaatacgttcccgggccttgtacacaccgcccgtcacaccatgggagccggtaatacccgaagtcagtagtctaaccgcaa

SEQ ID NO: 5 - DNA, 1424 bp, Enterococcus casseliflavus
  modified_base (2)..(2): a, c, t, g, unknown or other
  modified_base (5)..(5): a, c, t, g, unknown or other
  modified_base (1413)..(1413): a, c, t, g, unknown or other
anacntgcagtcgaacgctttttctttcaccggagcttgctccaccgaaagaaaaagagtggcgaacgggtgagtaacacgtgggtaacctgcccatcagaaggggataacacttggaaacaggtgctaataccgtataacactattttccgcatggaagaaagttgaaaggcgcttttgcgtcactgatggatggacccgcggtgcattagctagttggtgaggtaacggctcaccaaggcaacgatgcatagccgacctgagagggtgatcggccacactgggactgagacacggcccagactcctacgggaggcagcagtagggaatcttcggcaatggacgaaagtctgaccgagcaacgccgcgtgagtgaagaaggttttcggatcgtaaaactctgttgttagagaagaacaaggatgagagtaaaatgttcatcccttgacggtatctaaccagaaagccacggctaactacgtgccagcagccgcggtaatacgtaggtggcaagcgttgtccggatttattgggcgtaaagcgagcgcaggcggtttcttaagtctgatgtgaaagcccccggctcaaccggggagggtcattggaaactgggagacttgagtgcagaagaggagagtggaattccatgtgtagcggtgaaatgcgtagatatatggaggaacaccagtggcgaaggcggctctctggtctgtaactgacgctgaggctcgaaagcgtggggagcgaacaggattagataccctggtagtccacgccgtaaacgatgagtgctaagtgttggagggtttccgcccttcagtgctgcagcaaacgcattaagcactccgcctggggagtacgaccgcaaggttgaaactcaaaggaattgacgggggcccgcacaagcggtggagcatgtggtttaattcgaagcaacgcgaagaaccttaccaggtcttgacatcctttgaccactctagagatagagcttccccttcgggggcaaagtgacaggtggtgcatggttgtcgtcagctcgtgtcgtgagatgttgggttaagtcccgcaacgagcgcaacccttattgttagttgccatcatttagttgggcactctagcgagactgccggtgacaaaccggaggaaggtggggatgacgtcaaatcatcatgccccttatgacctgggctacacacgtgctacaatgggaagtacaacgagttgcgaagtcgcgaggctaagctaatctcttaaagcttctctcagttcggattgtaggctgcaactcgcctacatgaagccggaatcgctagtaatcgcggatcagcacgccgcggtgaatacgttcccgggccttgtacacaccgcccgtcacaccacgagagtttgtaacacccgaagtcggtgaggtancctttttggag

SEQ ID NO: 6 - DNA, 1410 bp, Unknown
  Description of Unknown: Enterobacter himalayensis sequence
  modified_base (361)..(363): a, c, t, g, unknown or other
  modified_base (954)..(955): a, c, t, g, unknown or other
  modified_base (964)..(965): a, c, t, g, unknown or other
  modified_base (1399)..(1399): a, c, t, g, unknown or other
tgcagtcgacggtaacaggaagcagcttgctgcttcgctgacgagtggcggacgggtgagtaatgtctgggaaactgcctgatggagggggataactactggaaacggtagctaataccgcataacgtcgcaagaccaaagagggggaccttcgggcctcttgccatcggatgtgcccagatgggattagctagtaggtggggtaacggctcacctaggcgacgatccctagctggtctgagaggatgaccagccacactggaactgagacacggtccagactcctacgggaggcagcagtggggaatattgcacaatgggcgcaagcctgatgcagccatgccgcgtgtatgaagaaggnnntcgggttgtaaagtactttcagcggggaggaaggcgataaggttaataaccttgtcgattgacgttacccgcagaagaagcaccggctaactccgtgccagcagccgcggtaatacggagggtgcaagcgttaatcggaattactgggcgtaaagcgcacgcaggcggtctgtcaagtcggatgtgaaatccccgggctcaacctgggaactgcattcgaaactggcaggctagagtcttgtagaggggggtagaattccaggtgtagcggtgaaatgcgtagagatctggaggaataccggtggcgaaggcgcccccctggacaaagactgacgctcaggtgcgaaaagcgtggggagcaaacaggattagataccctggtagtccacgccgtaaacgatgtcgacttggaggttgtgcccttgaggcgtggcttccggagctaacgcgttaagtcgaccgcctgggggagtacggccgcaaggttaaaactcaaatgaattgacgggggcccgcacaagcggtggagcatgtggtttaattcgatgcaacgcgaagaaccttacctactcttgacatccagagaacttnncagagatgnnttggtgccttcgggaactctgagacaggtgctgcatggctgtcgtcagctcgtgttgtgaaatgttgggttaagtcccgcaacgagcgcaacccttatcctttgttgccagcggtccggccgggaactcaaaggagactgccagtgataaactggaggaaggtggggatgacgtcaagtcatcatggcccttacgagtagggctacacacgtgctacaatggcgcatacaaagagaagcgacctcgcgagagcaagcggacctcataaagtgcgtcgtagtccggattggagtctgcaactcgactccatgaagtcggaatcgctagtaatcgtggatcagaatgccacggtgaatacgttcccgggccttgtacacaccgcccgtcacaccatgggagtgggttgcaaaagaagtaggtagcttaaccttcgngagggcgctac

SEQ ID NO: 7 - DNA, 1256 bp, Enterococcus casseliflavus
  modified_base (1)..(9): a, c, t, g, unknown or other
  modified_base (11)..(11): a, c, t, g, unknown or other
  modified_base (13)..(13): a, c, t, g, unknown or other
  modified_base (879)..(879): a, c, t, g, unknown or other
  modified_base (1024)..(1027): a, c, t, g, unknown or other
  modified_base (1030)..(1030): a, c, t, g, unknown or other
  modified_base (1037)..(1037): a, c, t, g, unknown or other
  modified_base (1039)..(1039): a, c, t, g, unknown or other
  modified_base (1057)..(1057): a, c, t, g, unknown or other
  modified_base (1061)..(1062): a, c, t, g, unknown or other
  modified_base (1064)..(1064): a, c, t, g, unknown or other
  modified_base (1066)..(1066): a, c, t, g, unknown or other
  modified_base (1071)..(1071): a, c, t, g, unknown or other
  modified_base (1073)..(1073): a, c, t, g, unknown or other
  modified_base (1078)..(1079): a, c, t, g, unknown or other
  modified_base (1081)..(1082): a, c, t, g, unknown or other
  modified_base (1093)..(1096): a, c, t, g, unknown or other
  modified_base (1098)..(1098): a, c, t, g, unknown or other
  modified_base (1104)..(1104): a, c, t, g, unknown or other
  modified_base (1106)..(1107): a, c, t, g, unknown or other
  modified_base (1114)..(1115): a, c, t, g, unknown or other
  modified_base (1118)..(1118): a, c, t, g, unknown or other
  modified_base (1125)..(1125): a, c, t, g, unknown or other
  modified_base (1127)..(1127): a, c, t, g, unknown or other
  modified_base (1133)..(1137): a, c, t, g, unknown or other
  modified_base (1139)..(1143): a, c, t, g, unknown or other
  modified_base (1146)..(1151): a, c, t, g, unknown or other
  modified_base (1155)..(1156): a, c, t, g, unknown or other
  modified_base (1159)..(1159): a, c, t, g, unknown or other
  modified_base (1161)..(1167): a, c, t, g, unknown or other
  modified_base (1172)..(1173): a, c, t, g, unknown or other
  modified_base (1176)..(1180): a, c, t, g, unknown or other
  modified_base (1182)..(1183): a, c, t, g, unknown or other
  modified_base (1185)..(1189): a, c, t, g, unknown or other
  modified_base (1191)..(1224): a, c, t, g, unknown or other
  modified_base (1226)..(1227): a, c, t, g, unknown or other
  modified_base (1229)..(1232): a, c, t, g, unknown or other
  modified_base (1237)..(1238): a, c, t, g, unknown or other
  modified_base (1240)..(1241): a, c, t, g, unknown or other
  modified_base (1243)..(1256): a, c, t, g, unknown or other
nnnnnnnnncnanacatgcagtcgaacgctttttctttcaccggagcttgctccaccgaaagaaaaagagtggcgaacgggtgagtaacacgtgggtaacctgcccatcagaaggggataacacttggaaacaggtgctaataccgtataacactattttccgcatggaagaaagttgaaaggcgcttttgcgtcactgatggatggacccgcggtgcattagctagttggtgaggtaacggctcaccaaggcaacgatgcatagccgacctgagagggtgatcggccacactgggactgagacacggcccagactcctacgggaggcagcagtagggaatcttcggcaatggacgaaagtctgaccgagcaacgccgcgtgagtgaagaaggttttcggatcgtaaaactctgttgttagagaagaacaaggatgagagtaaaatgttcatcccttgacggtatctaaccagaaagccacggctaactacgtgccagcagccgcggtaatacgtaggtggcaagcgttgtccggatttattgggcgtaaagcgagcgcaggcggtttcttaagtctgatgtgaaagcccccggctcaaccggggagggtcattggaaactgggagacttgagtgcagaagaggagagtggaattccatgtgtagcggtgaaatgcgtagatatatggaggaacaccagtggcgaaggcggctctctggtctgtaactgacgctgaggctcgaaagcgtggggagcgaacaggattagataccctggtagtccacgccgtaaacgatgagtgctaagtgttggagggtttccgcccttcagtgctgcagcaaacgcattaagcactccgcctggggagtacgaccgcanggttgaaactcaaaggaattgacgggggcccgcacaagcggtggagcatgtggtttaattcgaagcaacgcgaagaaccttaccaggtcttgacatcctttgaccactctagagatagagcttccccttcgggggcaaagtgacnnnnggngcatggntngtcgtcagctcgtgtcgngagnngntngggtnantcccnnannagcgcaccctnnnngntagttncnncatttannggnactctancnagactnnnnnannnnngannnnnngggnngangnnnnnnnatcannccnnnnngnncnnnnnannnnnnnnnnnnnnnnnnnnnnnnnnnnnnnnnncnncnnnngctanncnnannnnnnnnnnnnnn

SEQ ID NO: 8 - DNA, 1399 bp, Blautia luti
  modified_base (4)..(6): a, c, t, g, unknown or other
  modified_base (15)..(16): a, c, t, g, unknown or other
  modified_base (21)..(21): a, c, t, g, unknown or other
  modified_base (23)..(25): a, c, t, g, unknown or other
  modified_base (50)..(50): a, c, t, g, unknown or other
  modified_base (57)..(57): a, c, t, g, unknown or other
  modified_base (949)..(949): a, c, t, g, unknown or other
  modified_base (959)..(960): a, c, t, g, unknown or other
  modified_base (1387)..(1389): a, c, t, g, unknown or other
  modified_base (1395)..(1395): a, c, t, g, unknown or other
ttannntgcagtcgnncgggnannnttttattgaagcttcggcagatttnggctggntcctagtggcggacgggtgagtaacgcgtgggtaacctgccttgtacagggggataacagtcagaaatgactgctaataccgcataagcgcacaggaccgcatggtccggtgtgaaaaactccggtggtataagatggacccgcgttggattagcttgttggtggggtaacggcccaccaaggcgacgatccatagccggcctgagagggtgaacggccacattgggactgagacacggcccagactcctacgggaggcagcagtggggaatattgcacaatgggggaaaccctgatgcagcgacgccgcgtgaaggaagaagtatctcggtatgtaaacttctatcagcagggaagaaaatgacggtacctgactaagaagccccggctaactacgtgccagcagccgcggtaatacgtagggggcaagcgttatccggatttactgggtgtaaagggagcgtagacggatggacaagtctgatgtgaaaggctggggctcaaccccgggactgcattggaaactgcccgtcttgagtgccggagaggtaagcggaattcctagtgtagcggtgaaatgcgtagatattaggaggaacaccagtggcgaaggcggcttactggacggtaactgacgttgaggctcgaaagcgtggggagcaaacaggattagataccctggtagtccacgcggtaaacgatgaatgctaggtgtcgggtgacaaagtcattcggtgccgccgcaaacgcattaagcattccacctggggagtacgttcgcaagaatgaaactcaaaggaattgacggggacccgcacaagcggtggagcatgtggtttaattcgaagcaacgcgaagaaccttaccaagtcttgacatccctctgaccganacttaaccgnntcttcccttcggggcagaggagacaggtggtgcatggttgtcgtcagctcgtgtcgtgagatgttgggttaagtcccgcaacgagcgcaacccctatccccagtagccagcatttaaggtgggcactctgaggagactgccagggataacctggaggaaggcggggatgacgtcaaatcatcatgccccttatgatttgggctacacacgtgctacaatggcgtaaacaaagggaagcgaacccgcgagggtgggcaaatcccaaaaataacgtcccagttcggactgtagtctgcaacccgactacacgaagctggaatcgctagtaatcgcggatcagaatgccgcggtgaatacgttcccgggtcttgtacacaccgcccgtcacaccatgggagtcagtaacgcccgaagtcagtgacctaannnaagganggag

SEQ ID NO: 9 - DNA, 1285 bp, Bifidobacterium adolescentis
  modified_base (272)..(272): a, c, t, g, unknown or other
  modified_base (419)..(419): a, c, t, g, unknown or other
  modified_base (459)..(459): a, c, t, g, unknown or other
  modified_base (503)..(503): a, c, t, g, unknown or other
  modified_base (557)..(557): a, c, t, g, unknown or other
  modified_base (1265)..(1265): a, c, t, g, unknown or other
tcgacgggatcccaggagcttgctcctgggtgagagtggcgaacgggtgagtaatgcgtgaccgacctgccccatacaccggaatagctcctggaaacgggtggtaatgccggatgctccagttgaccgcatggtcttctgggaaagcttttgcggtatgggatggggtcgcgtcctatcagcttgatggcggggtaacggcccaccatggcttcgacgggtagccggcctgagagggcgaccggccacattgggactgagatacggcccanactcctacgggaggcagcagtggggaatattgcacaatgggcgcaagcctgatgcagcgacgccgcgtgcgggatgacggccttcgggttgtaaaccgcttttgactgggagcaagcccttcggggtgagtgtacctttcgaataancaccggctaactacgtgccagcagccgcggtaatacgtanggtgcaagcgttatccggaattattgggcgtaaagggctcgtangcggttcgtcgcgtccggtgtgaaagtccatcgcttaacggtggatccgcgccnggtacgggcgggcttgagtgcggtaggggagactggaattccccggtgtaacggtggaatgtgtagatatcgggaagaacaccaatggcgaaggcaggtctctgggccgtcactgacgctgaggagcgaaagcgtggggagcgaacaggattagataccctggtagtccacgccgtaaacggtggatgctggatgtggggaccattccacggtctccgtgtcggagccaacgcgttaagcatcccgcctggggagtacggccgcaaggctaaaactcaaagaaatgacgggggcccgcacaagcggcggagcatgcggattaattcgatgcaacgcgaagaaccttacctgggcttgacatgttcccgacagccgtagagatacggtctcccttcggggcgggttcacaggtggtgcatggtcgtcgtcagctcgtgtcgtgagatgttgggttaagtcccgcaacgagcgcaaccctcgccctgtgttgccagcacgtcgtggtgggaactcacgggggaccgccggggtcaactcggaggaagggggggaagacgtcagatcatcatgccccttacgtccagggcttcacgcatgctacaatggccggtacaacgggatgcgacaccgcgaggtggagcgaatcccttaaaaccggtctcagttcggattggagtctgcaaccggactccatgaaggcggagtcgntagtaatggcggatcagcaa

SEQ ID NO: 10 - DNA, 1390 bp, Blautia obeum
  modified_base (22)..(22): a, c, t, g, unknown or other
  modified_base (940)..(941): a, c, t, g, unknown or other
  modified_base (943)..(943): a, c, t, g, unknown or other
tgcagtcgaacgggaacctttnattgaagcttcggcagatttagctggtttctagtggcggacgggtgagtaacgcgtgggtaacctgccttatacagggggataacaaccagaaatggttgctaataccgcataagcgcacaggaccgcatggtccggtgtgaaaaactccggtggtataagatggacccgcgttggattagctagttggcagggtaacggcctaccaaggcgacgatccatagccggcctgagagggtgaacggccacattgggactgaaacacggcccagactcctacgggaggcagcagtggggaatattgcacaatgggggaaaccctgatgcagcgacgccgcgtgaaggaagaagtatctcggtatgtaaacttctatcagcagggaagatagtgacggtacctgactaagaagccccggctaactacgtgccagcagccgcggtaatacgtagggggcaagcgttatccggatttactgggtgtaaagggagcgtagacggactggcaagtctgatgtgaaaggcgggggctcaacccctggactgcattggaaactgttagtcttgagtgccggagaggtaagcggaattcctagtgtagcggtgaaatgcgtagatattaggaggaacaccagtggcgaaggcggcttactggacggtaactgacgttgaggctcgaaagcgtggggagcaaacaggattagataccctggtagtccacgccgtaaacgatgaatactaggtgttggggagcaaagctcttcggtgccgccgcaaacgcattaagtattccacctggggagtacgttcgcaagaatgaaactcaaaggaattgacggggacccgcacaagcggtggagcatgtggtttaattcgaagcaacgcgaagaaccttaccaagtcttgacatccctctgaccgnncntaaccgagactttccttcgggacaggggagacaggtggtgcatggttgtcgtcagctcgtgtcgtgagatgttgggttaagtcccgcaacgagcgcaacccctatccccagtagccagcggtccggccgggcactctgaggagactgccagggataacctggaggaaggcggggatgacgtcaaatcatcatgccccttatgatttgggctacacacgtgctacaatggcgtaaacaaagggaagcaagcctgcgaaggtaagcaaatcccaaaaataacgtcccagttcggactgcagtctgcaactcgactgcacgaagctggaatcgctagtaatcgcggatcagaatgccgcggtgaatacgttcccgggtcttgtacacaccgcccgtcacaccatgggagtcagtaacgcccgaagtcagtgacctaactgcaaagaagga

SEQ ID NO: 11 - DNA, 1383 bp, Bifidobacterium longum
  modified_base (9)..(10): a, c, t, g, unknown or other
tgcagtcgnncgggatccatcaggctttgcttggtggtgagagtggcgaacgggtgagtaatgcgtgaccgacctgccccatacaccggaatagctcctggaaacgggtggtaatgccggatgctccagttgatcgcatggtcttctgggaaagctttcgcggtatgggatggggtcgcgtcctatcagcttgacggcggggtaacggcccaccgtggcttcgacgggtagccggcctgagagggcgaccggccacattgggactgagatacggcccagactcctacgggaggcagcagtggggaatattgcacaatgggcgcaagcctgatgcagcgacgccgcgtgagggatggaggccttcgggttgtaaacctcttttatcggggagcaagcgagagtgagtttacccgttgaataagcaccggctaactacgtgccagcagccgcggtaatacgtagggtgcaagcgttatccggaattattgggcgtaaagggctcgtaggcggttcgtcgcgtccggtgtgaaagtccatcgcttaacggtggatccgcgccgggtacgggcgggcttgagtgcggtaggggagactggaattcccggtgtaacggtggaatgtgtagatatcgggaagaacaccaatggcgaaggcaggtctctgggccgttactgacgctgaggagcgaaagcgtggggagcgaacaggattagataccctggtagtccacgccgtaaacggtggatgctggatgtggggcccgttccacgggttccgtgtcggagctaacgcgttaagcatcccgcctggggagtacggccgcaaggctaaaactcaaagaaattgacgggggcccgcacaagcggcggagcatgcggattaattcgatgcaacgcgaagaaccttacctgggcttgacatgttcccgacggtcgtagagatacggcttcccttcggggcgggttcacaggtggtgcatggtcgtcgtcagctcgtgtcgtgagatgttgggttaagtcccgcaacgagcgcaaccctcgccccgtgttgccagcggattatgccgggaactcacgggggaccgccggggttaactcggaggaaggtggggatgacgtcagatcatcatgccccttacgtccagggcttcacgcatgctacaatggccggtacaacgggatgcgacgcggcgacgcggagcggatccctgaaaaccggtctcagttcggatcgcagtctgcaactcgactgcgtgaaggcggagtcgctagtaatcgcgaatcagcaacgtcgcggtgaatgcgttcccgggccttgtacacaccgcccgtcaagtcatgaaagtgggcagcacccgaagccggtggcctaacccctttgtgg

SEQ ID NO: 12 - DNA, 1400 bp, Alistipes onderdonkii
  modified_base (2)..(3): a, c, t, g, unknown or other
  modified_base (5)..(5): a, c, t, g, unknown or other
  modified_base (1399)..(1399): a, c, t, g, unknown or other
anncntgcagtcgaggggcatcgggattgaagcttgcttcaattgccggcgaccggcgcacgggtgcgtaacgcgtatgtaacctacctataacaggggcataacactgagaaattggtactaattccccataatattcggagaggcatctctccgggttgaaaactccggtggttatagatggacatgcgttgtattagctagttggtgaggtaacggctcaccaaggcaacgatacatagggggactgagaggttaaccccccacactggtactgagacacggaccagactcctacgggaggcagcagtgaggaatattggtcaatggacgcaagtctgaaccagccatgccgcgtgcaggaagacggctctatgagttgtaaactgcttttgtacgagggtaaactcacctacgtgtaggtgactgaaagtatcgtacgaataaggatcggctaactccgtgccagcagccgcggtaatacggaggattcaagcgttatccggatttattgggtttaaagggtgcgtaggcggtttgataagttagaggtgaaatcccggggcttaactccggaactgcctctaatactgttagactagagagtagttgcggtaggcggaatgtatggtgtagcggtgaaatgcttagagatcatacagaacaccgattgcgaaggcagcttaccaaactatatctgacgttgaggcacgaaagcgtggggagcaaacaggattagataccctggtagtccacgcagtaaacgatgataactcgttgtcggcgatacacagtcggtgactaagcgaaagcgataagttatccacctggggagtacgttcgcaagaatgaaactcaaaggaattgacgggggcccgcacaagcggaggaacatgtggtttaattcgatgatacgcgaggaaccttacccgggcttgaaagttactgacgattctggaaacaggatttcccttcggggcaggaaactaggtgctgcatggttgtcgtcagctcgtgccgtgaggtgtcgggttaagtcccataacgagcgcaacccctaccgttagttgccatcaggtcaagctgggcactctggcgggactgccggtgtaagccgagaggaaggtggggatgacgtcaaatcagcacggcccttacgtccggggctacacacgtgttacaatggtaggtacagagggtcgctactccgtgaggagatgccaatctcgaaagcctatctcagttcggattggaggctgaaacccgcctccatgaagttggattcgctagtaatcgcgcatcagccatggcgcggtgaatacgttcccgggccttgtacacaccgcccgtcaagccatggaagctgggggtgcctgaagttcgtgaccgcaaggagcgnc

SEQ ID NO: 13 - DNA, 1394 bp, Parabacteroides merdae
  modified_base (2)..(2): a, c, t, g, unknown or other
  modified_base (26)..(26): a, c, t, g, unknown or other
  modified_base (28)..(29): a, c, t, g, unknown or other
  modified_base (34)..(34): a, c, t, g, unknown or other
  modified_base (36)..(36): a, c, t, g, unknown or other
cngtcgaggggcagcatgatttgtancnntacanantgatggcgaccggcgcacgggtgagtaacgcgtatgcaacttacctatcagagggggatagcccggcgaaagtcggattaataccccataaaacaggggtcccgcatgggaatatttgttaaagattcatcgctgatagataggcatgcgttccattaggcagttggcggggtaacggcccaccaaaccgacgatggataggggttctgagaggaaggtcccccacattggtactgagacacggaccaaactcaaacgggaggcagcagtgaggaatattggtcaatggccgagaggctgaaccagccaagtcgcgtgaaggaagaaggatctatggtttgtaaacttcttttataggggaataaagtggaggacgtgtccttttttgtatgtaccctatgaataagcatcggctaactccgtgccagcagccgcggtaatacggaggatgcgagcgttatccggatttattgggtttaaagggtgcgtaggtggtgatttaagtcagcggtgaaagtttgtggctcaaccataaaattgccgttgaaactgggttacttgagtgtgtttgaggtaggcggaatgcgtggtgtagcggtgaaatgcatagatatcacgcagaactccgattgcgaaggcagcttactaaaccataactgacactgaagcacgaaagcgtggggatcaaacaggattagataccctggtagtccacgcagtaaacgatgattactaggagtttgcgatacaatgtaagctctacagcgaaagcgttaagtaatccacctggggagtacgccggcaacggtgaaactcaaaggaattgacgggggcccgcacaagcggaggaacatgtggtttaattcgatgatacgcgaggaaccttacccgggtttgaacgtagtctgaccggagtggaaacactccttctagcaatagcagattacgaggtgctgcatggttgtcgtcagctcgtgccgtgaggtgtcggcttaagtgccataacgagcgcaacccttatcactagttactaacaggtgaagctgaggactctggtgagactgccagcgtaagctgtgaggaaggtggggatgacgtcaaatcagcacggcccttacatccggggcgacacacgtgttacaatggcatggacaaagggcagctacctggcgacaggatgctaatctccaaaccatgtctcagttcggatcggagtctgcaactcgactccgtgaagctggattcgctagtaatcgcgcatcagccatggcgcggtgaatacgttcccgggccttgtacacaccgcccgtcaagccatgggagccgggggtacctgaagtccgtaaccgcaaggatcg

SEQ ID NO: 14 - DNA, 1389 bp, Blautia luti
  modified_base (15)..(17): a, c, t, g, unknown or other
  modified_base (20)..(20): a, c, t, g, unknown or other
  modified_base (30)..(30): a, c, t, g, unknown or other
  modified_base (47)..(47): a, c, t, g, unknown or other
  modified_base (50)..(52): a, c, t, g, unknown or other
  modified_base (54)..(54): a, c, t, g, unknown or other
tgcagtcgaacgggnnntantttattgaancttcggccgatttaganctnnntnctagtggcggacgggtgagtaacgcgtgggtaacctgccttgtacagggggataacagtcagaaatgactgctaataccgcataagcgcacaggaccgcatggtccggtgtgaaaaactccggtggtataagatggacccgcgttggattagcttgttggcggggtaacggcctaccaaggcgacgatccatagccggcctgagagggtgaacggccacattgggactgagacacggcccagactcctacgggaggcagcagtggggaatattgcacaatgggggaaaccctgatgcagcgacgccgcgtgaaggaagaagtatctcggtatgtaaacttctatcagcagggaagaaaatgacggtacctgactaagaagccccggctaactacgtgccagcagccgcggtaatacgtagggggcaagcgttatccggatttactgggtgtaaagggagcgtagacggatggacaagtctgatgtgaaaggctggggctcaaccccgggactgcattggaaactgcccgtcttgagtgccggagaggtaagcggaattcctagtgtagcggtgaaatgcgtagatattaggaggaacaccagtggcgaaggcggcttactggacggtaactgacgttgaggctcgaaagcgtggggagcaaacaggattagataccctggtagtccacgcggtaaacgatgaatgctaggtgtcgggtgacaaagtcattcggtgccgccgcaaacgcattaagcattccacctggggagtacgttcgcaagaatgaaactcaaaggaattgacggggacccgcacaagcggtggagcatgtggtttaattcgaagcaacgcgaagaaccttaccaagtcttgacatccctctgaccggaacttaaccgttccttcccttcggggcagaggagacaggtggtgcatggttgtcgtcagctcgtgtcgtgagatgttgggttaagtcccgcaacgagcgcaacccctatccccagtagccagcatttaaggtgggcactctgaggagactgccagggataacctggaggaaggcggggatgacgtcaaatcatcatgccccttatgatttgggctacacacgtgctacaatggcgtaaacaaagggaagcgaacccgcgagggtgggcaaatcccaaaaataacgtcccagttcggactgtagtctgcaacccgactacacgaagctggaatcgctagtaatcgcggatcagaatgccgcggtgaatacgttcccgggtcttgtacacaccgcccgtcacaccatgggagtcagtaacgcccgaagtcagtgacctaaccgtaagg

SEQ ID NO: 15 - DNA, 1357 bp, Bacteroides uniformis
  modified_base (5)..(10): a, c, t, g, unknown or other
gctannnnnnatggcgaccggcgcaggggtgagtaacacgtatgccaacctgccgatgactcggggatagcctttcgaaagaaagattaatacccgatggcataattcttccgcatggtagaactattaaagaatttcggtcatcgatggggatgcgttccattaggttgttggcggggtaacggcccaccaagccttcgatggataggggttctgagaggaaggtcccccacattggaactgagacacggtccaaactcctacgggaggcagcagtgaggaatattggtcaatggacgagagtctgaaccagccaagtagcgtgaaggatgactgccctatgggttgtaaacttcttttatacgggaataaagtgaggcacgtgtgcctttttgtatgtaccgtatgaataaggatcggctaactccgtgccagcagccgcggtaatacggaggatccgagcgttatccggatttattgggtttaaagggagcgtaggcggacgcttaagtcagttgtgaaagtttgcggctcaaccgtaaaattgcagttgatactgggtgtcttgagtacagtagaggcaggcggaattcgtggtgtagcggtgaaatgcttagatatcacgaagaactccgattgcgaaggcagcttgctggactgtaactgacgctgatgctcgaaagtgtgggtatcaaacaggattagataccctggtagtccacacagtaaacgatgaatactcgctgtttgcgatatacagtaagcggccaagcgaaagcgttaagtattccacctggggagtacgccggcaacggtgaaactcaaaggaattgacgggggcccgcacaagcggaggaacatgtggtttaattcgatgatacgcgaggaaccttacccgggcttgaattgcaactgaatgatgtggagacatgtcagccgcaaggcagttgtgaaggtgctgcatggttgtcgtcagctcgtgccgtgaggtgtcggcttaagtgccataacgagcgcaacccttatcgatagttaccatcaggttatgctggggactctgtcgagactgccgtcgtaagatgtgaggaaggtggggatgacgtcaaatcagcacggcccttacgtccggggctacacacgtgttacaatggggggtacagaaggcagctacacggcgacgtgatgctaatccctaaagcctctctcagttcggattggagtctgcaacccgactccatgaagctggattcgctagtaatcgcgcatcagccacggcgcggtgaatacgttcccgggccttgtacacaccgcccgtcaagccatgaaagccgggggtacctgaagtgcgtaaccgcga

SEQ ID NO: 16 - DNA, 1390 bp, Bifidobacterium pseudocatenulatum
  modified_base (9)..(9): a, c, t, g, unknown or other
  modified_base (1387)..(1387): a, c, t, g, unknown or other
tgcagtcgnacgggatccatcaggctttgcttggtggtgagagtggcgaacgggtgagtaatgcgtgaccgacctgccccatacaccggaatagctcctggaaacgggtggtaatgccggatgctccgactcctcgcatggggtgtcgggaaagatttcatcggtatgggatggggtcgcgtcctatcaggtagtcggcggggtaacggcccaccgagcctacgacgggtagccggcctgagagggcgaccggccacattgggactgaaatacggcccaaactcctacgggaggcagcagtggggaatattgcacaatgggcgcaagcctgatgcagcgacgccgcgtgcgggatgacggccttcgggttgtaaaccgcttttgatcgggagcaagccttcgggtgagtgtacctttcgaataagcaccggctaactacgtgccagcagccgcggtaatacgtagggtgcaagcgttatccggaattattgggcgtaaagggctcgtaggcggttcgtcgcgtccggtgtgaaagtccatcgcttaacggtggatctgcgccgggtacgggcgggctggagtgcggtaggggagactggaattcccggtgtaacggtggaatgtgtagatatcgggaagaacaccaatggcgaaggcaggtctctgggccgttactgacgctgaggagcgaaagcgtggggagcgaacaggattagataccctggtagtccacgccgtaaacggtggatgctggatgtggggcccgttccacgggttccgtgtcggagctaacgcgttaagcatcccgcctggggagtacggccgcaaggctaaaactcaaagaaattgacgggggcccgcacaagcggcggagcatgcggattaattcgatgcaacgcgaagaaccttacctgggcttgacatgttcccgacagccgtagagatatggcctcccttcggggcgggttcacaggtggtgcatggtcgtcgtcagctcgtgtcgtgagatgttgggttaagtcccgcaacgagcgcaaccctcgccctgtgttgccagcacgtcatggtgggaactcacgggggaccgccggggtcaactcggaggaaggtggggatgacgtcagatcatcatgccccttacgtccagggcttcacgcatgctacaatggccggtacaacgggatgcgacacggcgacgtggagcggatccctgaaaaccggtctcagttcggattggagtctgcaacccgactccatgaaggcggagtcgctagtaatcgcggatcagcaacgccgcggtgaatgcgttcccgggccttgtacacaccgcccgtcaagtcatgaaagtgggtagcacccgaagccggtggcctaaccctttgtggangga

SEQ ID NO: 17 - DNA, 1396 bp, Blautia obeum
  modified_base (2)..(3): a, c, t, g, unknown or other
  modified_base (5)..(5): a, c, t, g, unknown or other
  modified_base (14)..(14): a, c, t, g, unknown or other
  modified_base (945)..(945): a, c, t, g, unknown or other
anncntgcagtcgncgggaaccttttattgaagcttcggcagatttagctggtttctagtggcggacgggtgagtaacgcgtgggtaacctgccttatacagggggataacaaccagaaatggttgctaataccgcataagcgcacaggaccgcatggtccggtgtgaaaaactccggtggtataagatggacccgcgttggattagctagttggcagggtaacggcctaccaaggcgacgatccatagccggcctgagagggtgaacggccacattgggactgagacacggcccagactcctacgggaggcagcagtggggaatattgcacaatgggggaaaccctgatgcagcgacgccgcgtgaaggaagaagtatctcggtatgtaaacttctatcagcagggaagatagtgacggtacctgactaagaagccccggctaactacgtgccagcagccgcggtaatacgtagggggcaagcgttatccggatttactgggtgtaaagggagcgtagacggactggcaagtctgatgtgaaaggcgggggctcaacccctggactgcattggaaactgttagtcttgagtgccggagaggtaagcggaattcctagtgtagcggtgaaatgcgtagatattaggaggaacaccagtggcgaaggcggcttactggacggtaactgacgttgaggctcgaaagcgtggggagcaaacaggattagataccctggtagtccacgccgtaaacgatgaatactaggtgttggggagcaaagctcttcggtgccgccgcaaacgcattaagtattccacctggggagtacgttcgcaagaatgaaactcaaaggaattgacggggacccgcacaagcggtggagcatgtggtttaattcgaagcaacgcgaagaaccttaccaagtcttgacatccctctgaccgantcttaaccgagtctttccttcgggacaggggagacaggtggtgcatggttgtcgtcagctcgtgtcgtgagatgttgggttaagtcccgcaacgagcgcaacccctatccccagtagccagcagtccggctgggcactctgaggagactgccagggataacctggaggaaggcggggatgacgtcaaatcatcatgccccttatgatttgggctacacacgtgctacaatggcgtaaacaaagggaagcaagcctgcgaaggtaagcaaatcccaaaaataacgtcccagttcggactgcagtctgcaactcgactgcacgaagctggaatcgctagtaatcgcggatcagaatgccgcggtgaatacgttcccgggtcttgtacacaccgcccgtcacaccatgggagtcagtaacgcccgaagtcagtgacctaactgcaaagaaggag

SEQ ID NO: 18 - DNA, 1400 bp, Eubacterium rectale
  modified_base (2)..(5): a, c, t, g, unknown or other
  modified_base (1382)..(1382): a, c, t, g, unknown or other
annnntgcagtcgaacgaagcactttatttgatttccttcgggactgattattttgtgactgagtggcggacgggtgagtaacgcgtgggtaacctgccttgtacagggggataacagttggaaacggctgctaataccgcataagcgcacagcatcgcatgatgcagtgtgaaaaactccggtggtataagatggacccgcgttggattagctagttggtgaggtaacggcccaccaaggcgacgatccatagccgacctgagagggtgaccggccacattgggactgagacacggcccaaactcctacgggaggcagcagtggggaatattgcacaatgggcgaaagcctgatgcagcgacgccgcgtgagcgaagaagtatttcggtatgtaaagctctatcagcagggaagataatgacggtacctgactaagaagcaccggctaaatacgtgccagcagccgcggtaatacgtatggtgcaagcgttatccggatttactgggtgtaaagggagcgcaggcggtgcggcaagtctgatgtgaaagcccggggctcaaccccggtactgcattggaaactgtcgtactagagtgtcggaggggtaagcggaattcctagtgtagcggtgaaatgcgtagatattaggaggaacaccagtggcgaaggcggcttactggacgataactgacgctgaggctcgaaagcgtggggagcaaacaggattagataccctggtagtccacgccgtaaacgatgaatactaggtgttgggaagcattgcttctcggtgccgtcgcaaacgcagtaagtattccacctggggagtacgttcgcaagaatgaaactcaaaggaattgacggggacccgcacaagcggtggagcatgtggtttaattcgaagcaacgcgaagaaccttaccaagtcttgacatccttctgaccggtacttaaccgtatcttctcttcggagcaggagtgacaggtggtgcatggttgtcgtcagctcgtgtcgtgagatgttgggttaagtcccgcaacgagcgcaacccttatctttagtagccagcggttcggccgggcactctagagagactgccagggataacctggaggaaggcggggatgacgtcaaatcatcatgccccttatgacttgggctacacacgtgctacaatggcgtaaacaaagggaagcaaagctgtgaagccgagcaaatctcaaaaataacgtctcagttcggactgtagtctgcaacccgactacacgaagctggaatcgctagtaatcgcagatcagaatgctgcggtgaatacgttcccgggtcttgtacacaccgcccgtcacaccatgggagttgggaatgcccgaagccagtgncctaaccgaaaggaagga

SEQ ID NO: 19 - DNA, 1393 bp, Alistipes timonensis
  modified_base (21)..(22): a, c, t, g, unknown or other
  modified_base (30)..(30): a, c, t, g, unknown or other
  modified_base (57)..(57): a, c, t, g, unknown or other
  modified_base (292)..(292): a, c, t, g, unknown or other
tgcagtcgaggggcagcgggnntgaagctntgcttcaatcgccggcgaccggcgcangggtgcgtaacgcgtatgcaacctacccagaacagggggataacactgagaaattggtactaatatcccataacatcataaggggcatcccttttggttgaaaactccggtggttctggatgggcatgcgttgtattagctagttggtgaggtaacggctcaccaaggcaacgatacatagggggactgagaggttaaccccccacattggtactgagacacggaccaaactccnacgggaggcagcagtgaggaatattggtcaatggacgcaagtctgaaccagccatgccgcgtgcaggaagacggctctatgagttgtaaactgcttttgtactagggtaaactcagatacgtgtatctgactgaaagtatagtacgaataaggatcggctaactccgtgccagcagccgcggtaatacggaggattcaagcgttatccggatttattgggtttaaagggtgcgtaggcggtttgataagttagaggtgaaataccggtgcttaacaccggaactgcctctaatactgttgagctagagagtagttgcggtaggcggaatgtatggtgtagcggtgaaatgcttagagatcatacagaacaccgattgcgaaggcagcttaccaaactatatctgacgttgaggcacgaaagcgtggggagcaaacaggattagataccctggtagtccacgcagtaaacgatgataactcgctgtcggcgatacacagtcggtggctaagcgaaagcgataagttatccacctggggagtacgttcgcaagaatgaaactcaaaggaattgacgggggcccgcacaagcggaggaacatgtggtttaattcgatgatacgcgaggaaccttacccgggcttgaaagttagtgacggatctggaaacaggtcttcccttcggggcacgaaactaggtgctgcatggttgtcgtcagctcgtgccgtgaggtgtcgggttaagtcccataacgagcgcaacccctaccgttagttgccatcaggtcaagctgggcactctgacgggactgccggtgtaagccgagaggaaggtggggatgacgtcaaatcagcacggcccttacgtccggggccacacacgtgttacaatggtaggtacagagggcagctacccagcgatgggatgcgaatctcgaaagcctatctcagttcggatcggaggctgaaacccgcctccgtgaagttggattcgctagtaatcgcgcatcagccatggcgcggtgaatacgttcccgggccttgtacacaccgcccgtcaagccatggaagctgggggtgcctgaagttcgtgaccgcaaggagc

SEQ ID NO: 20 - DNA, 1390 bp, Bacteroides thetaiotaomicron
  modified_base (14)..(14): a, c, t, g, unknown or other
  modified_base (18)..(18): a, c, t, g, unknown or other
  modified_base (23)..(23): a, c, t, g, unknown or other
  modified_base (27)..(27): a, c, t, g, unknown or other
gtcgaggggcagcntttnagttntgcnttgcaaactggagatggcgaccggcgcacgggtgagtaacacgtatccaacctgccgataactcggggatagcctttcgaaagaaagattaatacccgatggtataatcagaccgcatggtcttgttattaaagaatttcggttatcgatggggatgcgttccattaggcagttggtgaggtaacggctcaccaaaccttcgatggataggggttctgagaggaaggtcccccacattggaactgagacacggtccaaactcctacgggaggcagcagtgaggaatattggtcaatgggcgcaggcctgaaccagccaagtagcgtgaaggatgactgccctatgggttgtaaacttcttttatatgggaataaagttttccacgtgtggaattttgtatgtaccatatgaataaggatcggctaactccgtgccagcagccgcggtaatacggaggatccgagcgttatccggatttattgggtttaaagggagcgtaggtggacagttaagtcagttgtgaaagtttgcggctcaaccgtaaaattgcagttgatactggctgtcttgagtacagtagaggtgggcggaattcgtggtgtagcggtgaaatgcttagatatcacgaagaactccgattgcgaaggcagctcactggactgcaactgacactgatgctcgaaagtgtgggtatcaaacaggattagataccctggtagtccacacagtaaacgatgaatactcgctgtttgcgatatacagtaagcggccaagcgaaagcattaagtattccacctggggagtacgccggcaacggtgaaactcaaaggaattgacgggggcccgcacaagcggaggaacatgtggtttaattcgatgatacgcgaggaaccttacccgggcttaaattgcatttgaatatattggaaacagtatagtcgtaagacaaatgtgaaggtgctgcatggttgtcgtcagctcgtgccgtgaggtgtcggcttaagtgccataacgagcgcaacccttatctttagttactaacaggtcatgctgaggactctagagagactgccgtcgtaagatgtgaggaaggtggggatgacgtcaaatcagcacggcccttacgtccggggctacacacgtgttacaatggggggtacagaaggcagctacctggtgacaggatgctaatcccaaaagcctctctcagttcggatcgaagtctgcaacccgacttcgtgaagctggattcgctagtaatcgcgcatcagccatggcgcggtgaatacgttcccgggccttgtacacaccgcccgtcaagccatgaaagccgggggtacctgaagtacgtaaccgcaaggag

SEQ ID NO: 21 - DNA, 1395 bp, Unknown
  Description of Unknown: Bacteroides kribbi / Bacteroides koreensis species cluster sequence
  modified_base (20)..(20): a, c, t, g, unknown or other
  modified_base (23)..(23): a, c, t, g, unknown or other
  modified_base (25)..(25): a, c, t, g, unknown or other
  modified_base (40)..(40): a, c, t, g, unknown or other
  modified_base (59)..(59): a, c, t, g, unknown or other
  modified_base (262)..(262): a, c, t, g, unknown or other
  modified_base (1392)..(1392): a, c, t, g, unknown or other
cagtcgaggggcagcatttntangnttgcgttgcaaacgngaagatggcgacgggcggncgggtgagtaacacgtatccaacctgccgataactccggaatagcctttcgaaagaaagattaataccggatagcatacgaatatcgcatgatatttttattaaagaatttcggttatcgatggggatgcgttccattagtttgttggcggggtaacggcccaccaagactacgatggataggggttctgagaggaaggtccnccacattggaactgagacacggtccaaactcctacgggaggcagcagtgaggaatattggtcaatgggcgagagcctgaaccagccaagtagcgtgaaggatgaaggctctatgggtcgtaaacttcttttatatgggaataaagttttccacgtgtggaattttgtatgtaccatatgaataaggatcggctaactccgtgccagcagccgcggtaatacggaggatccgagcgttatccggatttattgggtttaaagggagcgtaggtggattgttaagtcagttgtgaaagtttgcggctcaaccgtaaaattgcagttgaaactggcagtcttgagtacagtagaggtgggcggaattcgtggtgtagcggtgaaatgcttagatatcacgaagaactccgattgcgaaggcagctcactagactgttactgacactgatgctcgaaagtgtgggtatcaaacaggattagataccctggtagtccacacagtaaacgatgaatactcgctgtttgcgatatacagtaagcggccaagcgaaagcattaagtattccacctggggagtacgccggcaacggtgaaactcaaaggaattgacgggggcccgcacaagcggaggaacatgtggtttaattcgatgatacgcgaggaaccttacccgggcttaaattgcaacagaatatattggaaacagtatagccgtaaggctgttgtgaaggtgctgcatggttgtcgtcagctcgtgccgtgaggtgtcggcttaagtgccataacgagcgcaacccttatctttagttactaacaggttatgctgaggactctagagagactgccgtcgtaagatgtgaggaaggtggggatgacgtcaaatcagcacggcccttacgtccggggctacacacgtgttacaatggggggtacagaaggcggctacctggtgacaggatgctaatcccaaaaacctctctcagttcggatcgaagtctgcaacccgacttcgtgaagctggattcgctagtaatcgcgcatcagccatggcgcggtgaatacgttcccgggccttgtacacaccgcccgtcaagccatgaaagccgggggtacctgaagtacgtaaccgcaagnagc

SEQ ID NO: 22 - DNA, 1378 bp, Alistipes putredinis
  modified_base (1370)..(1370): a, c, t, g, unknown or other
tgcaagtcgaggggcagcataatggatagcaatatctatggtggcgaccggcgcacgggtgcgtaacgcgtatgcaacctacctttaacagggggataacactgagaaattggtactaataccccataatatcatagaaggcatcttttatggttgaaaattccgatggttagagatgggcatgcgttgtattagctagttggtggggtaacggctcaccaaggcgacgatacatagggggactgagaggttaaccccccacactggtactgagacacggaccagactcctacgggaggcagcagtgaggaatattggtcaatggacgcaagtctgaaccagccatgccgcgtgcaggatgacggctctatgagttgtaaactgcttttgtacgagggtaaacgcagatacgtgtatctgtctgaaagtatcgtacgaataaggatcggctaactccgtgccagcagccgcggtaatacggaggattcaagcgttatccggatttattgggtttaaagggtgcgtaggcggtttgataagttagaggtgaaatttcggggctcaaccctgaacgtgcctctaatactgttgagctagagagtagttgcggtaggcggaatgtatggtgtagcggtgaaatgcttagagatcatacagaacaccgattgcgaaggcagcttaccaaactatatctgacgttgaggcacgaaagcgtggggagcaaacaggattagataccctggtagtccacgcagtaaacgatgataactcgttgtcggcgatacacagtcggtgactaagcgaaagcgataagttatccacctggggagtacgttcgcaagaatgaaactcaaaggaattgacgggggcccgcacaagcggaggaacatgtggtttaattcgatgatacgcgaggaaccttacccgggcttgaaagttagcgacgattcttgaaagaggatttcccttcggggcgcgaaactaggtgctgcatggttgtcgtcagctcgtgccgtgaggtgtcgggttaagtcccataacgagcgcaacccctaccgttagttgccatcaggtgaagctgggcactctggcgggactgccggtgtaagccgagaggaaggtggggatgacgtcaaatcagcacggcccttacgtccggggctacacacgtgttacaatggtaggtacagagggcagctacccagcgatgggatgcgaatctcgaaagcctatctcagttcggattggaggctgaaacccgcctccatgaagttggattcgctagtaatcgcgcatcagccatggcgcggtgaatacgttcccgggccttgtacacaccgcccgtcaagccatgggagccgggggtgccngaagttcg

SEQ ID NO: 23 - DNA, 1428 bp, Enterococcus casseliflavus
  modified_base (2)..(2): a, c, t, g, unknown or other
  modified_base (1410)..(1410): a, c, t, g, unknown or other
cntgcagtcgaacgctttttctttcaccggagcttgctccaccgaaagaaaaagagtggcgaacgggtgagtaacacgtgggtaacctgcccatcagaaggggataacacttggaaacaggtgctaataccgtataacactattttccgcatggaagaaagttgaaaggcgcttttgcgtcactgatggatggacccgcggtgcattagctagttggtgaggtaacggctcaccaaggcaacgatgcatagccgacctgagagggtgatcggccacactgggactgagacacggcccagactcctacgggaggcagcagtagggaatcttcggcaatggacgaaagtctgaccgagcaacgccgcgtgagtgaagaaggttttcggatcgtaaaactctgttgttagagaagaacaaggatgagagtaaaatgttcatcccttgacggtatctaaccagaaagccacggctaactacgtgccagcagccgcggtaatacgtaggtggcaagcgttgtccggatttattgggcgtaaagcgagcgcaggcggtttcttaagtctgatgtgaaagcccccggctcaaccggggagggtcattggaaactgggagacttgagtgcagaagaggagagtggaattccatgtgtagcggtgaaatgcgtagatatatggaggaacaccagtggcgaaggcggctctctggtctgtaactgacgctgaggctcgaaagcgtggggagcgaacaggattagataccctggtagtccacgccgtaaacgatgagtgctaagtgttggagggtttccgcccttcagtgctgcagcaaacgcattaagcactccgcctggggagtacgaccgcaaggttgaaactcaaaggaattgacgggggcccgcacaagcggtggagcatgtggtttaattcgaagcaacgcgaagaaccttaccaggtcttgacatcctttgaccactctagagatagagcttccccttcgggggcaaagtgacaggtggtgcatggttgtcgtcagctcgtgtcgtgagatgttgggttaagtcccgcaacgagcgcaacccttattgttagttgccatcatttagttgggcactctagcgagactgccggtgacaaaccggaggaaggtggggatgacgtcaaatcatcatgccccttatgacctgggctacacacgtgctacaatgggaagtacaacgagttgcgaagtcgcgaggctaagctaatctcttaaagcttctctcagttcggattgtaggctgcaactcgcctacatgaagccggaatcgctagtaatcgcggatcagcacgccgcggtgaatacgttcccgggccttgtacacaccgcccgtcacaccacgagagtttgtaacacccgaagtcggtgaggtanccttttggagccagccgc

SEQ ID NO: 24 - DNA, 1395 bp, Unknown
  Description of Unknown: Bacteroides kribbi / Bacteroides koreensis species cluster sequence
  modified_base (38)..(38): a, c, t, g, unknown or other
  modified_base (952)..(952): a, c, t, g, unknown or other
  modified_base (977)..(978): a, c, t, g, unknown or other
cagtcgaggggcagcattttagtttgcgttgcaaacgngaagatggcgaccggcgcacgggtgagtaacacgtatccaacctgccgataactccgggatagcctttcgaaagaaagattaataccggatggcatactaatatcgcatgatatttttattaaagaatttcggttatcgatggggatgcgttccattagtttgttggcggggtaacggcccaccaagactacgatggataggggttctgagaggaaggtcccccacattggaactgagacacggtccaaactcctacgggaggcagcagtgaggaatattggtcaatgggcgagagcctgaaccagccaagtagcgtgaaggatgaaggctctatgggtcgtaaacttcttttatatgggaataaagtattccacgtgtggaattttgtatgtaccatatgaataaggatcggctaactccgtgccagcagccgcggtaatacggaggatccgagcgttatccggatttattgggtttaaagggagcgtaggtggattgttaagtcagttgtgaaagtttgcggctcaaccgtaaaattgcagttgaaactggcagtcttgagtacagtagaggtgggcggaattcgtggtgtagcggtgaaatgcttagatatcacgaagaactccgattgcgaaggcagctcactagactgcaactgacactgatgctcgaaagtgtgggtatcaaacaggattagataccctggtagtccacacagtaaacgatgaatactcgctgtttgcgatatacagtaagcggccaagcgaaagcattaagtattccacctggggagtacgccggcaacggtgaaactcaaaggaattgacgggggcccgcacaagcggaggaacatgtggtttaattcgatgatacgcgaggaaccttacccgggcttaaattgcatcagaatatnttggaaacagtatagccgtaaggcnnttgtgaaggtgctgcatggttgtcgtcagctcgtgccgtgaggtgtcggcttaagtgccataacgagcgcaacccttatctttagttactaacaggtcatgctgaggactctagagagactgccgtcgtaagatgtgaggaaggtggggatgacgtcaaatcagcacggcccttacgtccggggctacacacgtgttacaatggggggtacagaaggcggctacctggtgacaggatgctaatcccaaaaacctctctcagttcggatcgaagtctgcaacccgacttcgtgaagctggattcgctagtaatcgcgcatcagccatggcgcggtgaatacgttcccgggccttgtacacaccgcccgtcaagccatgaaagccgggggtacctgaagtacgtaaccgcaaggagcgt

SEQ ID NO: 25 - DNA, 1393 bp, Coprococcus comes
  modified_base (8)..(9): a, c, t, g, unknown or other
  modified_base (20)..(21): a, c, t, g, unknown or other
  modified_base (1389)..(1389): a, c, t, g, unknown or other
gcagtcgnncgaagcacttnnctttgattcttcggatgaagaggtttgtgactgagtggcggacgggtgagtaacgcgtgggtaacctgcctcatacagggggataacagttagaaatgactgctaataccgcataagaccacagagccgcatggctcagagggaaaaactccggtggtatgagatggacccgcgtctgattaggtagttggtggggtaacggcctaccaagccaacgatcagtagccgacctgagagggtgaccggccacattgggactgagacacggcccaaactcctacgggaggcagcagtggggaatattgcacaatgggggaaaccctgatgcagcgacgccgcgtgagcgaagaagtatttcggtatgtaaagctctatcagcagggaagaaaatgacggtacctgactaagaagcaccggctaaatacgtgccagcagccgcggtaatacgtatggtgcaagcgttatccggatttactgggtgtaaagggagcgtagacggctgtgtaagtctgaagtgaaagcccggggctcaaccccgggactgctttggaaactatgcagctagagtgtcggagaggtaagtggaattcccagtgtagcggtgaaatgcgtagatattgggaggaacaccagtggcgaaggcggcttactggacgatgactgacgttgaggctcgaaagcgtggggagcaaacaggattagataccctggtagtccacgccgtaaacgatgactactaggtgtcggggagcaaagctcttcggtgccgcagcaaacgcaataagtagtccacctggggagtacgttcgcaagaatgaaactcaaaggaattgacggggacccgcacaagcggtggagcatgtggtttaattcgaagcaacgcgaagaaccttacctgctcttgacatcccggtgaccggcgtgtaatgacgccttttcttcggaacaccggtgacaggtggtgcatggttgtcgtcagctcgtgtcgtgagatgttgggttaagtcccgcaacgagcgcaacccttatcttcagtagccagcaattcggatgggcactctggagagactgccagggataacctggaggaaggtggggatgacgtcaaatcatcatgccccttatgagcagggctacacacgtgctacaatggcgtaaacaaagggaagcgagcctgcgagggtaagcaaatctcaaaaataacgtctcagttcggattgtagtctgcaactcgactacatgaagctggaatcgctagtaatcgcgaatcagcatgtcgcggtgaatacgttcccgggtcttgtacacaccgcccgtcacaccatgggagttggtaacgcccgaagtcagtgacccaaccgtaagganggag

SEQ ID NO: 26 - DNA, 1404 bp, Unknown
  Description of Unknown: Enterobacter hormaechei sequence
  modified_base (9)..(10): a, c, t, g, unknown or other
  modified_base (954)..(954): a, c, t, g, unknown or other
  modified_base (964)..(964): a, c, t, g, unknown or other
  modified_base (1397)..(1398): a, c, t, g, unknown or other
tgcagtcgnncggtaacaggaagcagcttgctgcttcgctgacgagtggcggacgggtgagtaatgtctgggaaactgcctgatggagggggataactactggaaacggtagctaataccgcataacgtcgcaagaccaaagagggggaccttcgggcctcttgccatcggatgtgcccagatgggattagctagtaggtggggtaacggctcacctaggcgacgatccctagctggtctgagaggatgaccagccacactggaactgagacacggtccagactcctacgggaggcagcagtggggaatattgcacaatgggcgcaagcctgatgcagccatgccgcgtgtatgaagaaggccttcgggttgtaaagtactttcagcggggaggaaggcgataaggttaataaccttgtcgattgacgttacccgcagaagaagcaccggctaactccgtgccagcagccgcggtaatacggagggtgcaagcgttaatcggaattactgggcgtaaagcgcacgcaggcggtctgtcaagtcggatgtgaaatccccgggctcaacctgggaactgcattcgaaactggcaggctagagtcttgtagaggggggtagaattccaggtgtagcggtgaaatgcgtagagatctggaggaataccggtggcgaaggcggccccctggacaaagactgacgctcaggtgcgaaagcgtggggagcaaacaggattagataccctggtagtccacgccgtaaacgatgtcgacttggaggttgtgcccttgaggcgtggcttccggagctaacgcgttaagtcgaccgcctggggagtacggccgcaaggttaaaactcaaatgaattgacgggggcccgcacaagcggtggagcatgtggtttaattcgatgcaacgcgaagaaccttacctactcttgacatccagagaactttnccagagatgnatggtgccttcgggaactctgagacaggtgctgcatggctgtcgtcagctcgtgttgtgaaatgttgggttaagtcccgcaacgagcgcaacccttatcctttgttgccagcggtccggccgggaactcaaaggagactgccagtgataaactggaggaaggtggggatgacgtcaagtcatcatggcccttacgagtagggctacacacgtgctacaatggcgcatacaaagagaagcgacctcgcgagagcaagcggacctcataaagtgcgtcgtagtccggattggagtctgcaactcgactccatgaagtcggaatcgctagtaatcgtggatcagaatgccacggtgaatacgttcccgggccttgtacacaccgcccgtcacaccatgggagtgggttgcaaaagaagtaggtagcttaaccttcnngagggc

SEQ ID NO: 27 - DNA, 1380 bp, Unknown
  Description of Unknown: Fusicatenibacter saccharivorans sequence
  modified_base (2)..(3): a, c, t, g, unknown or other
  modified_base (40)..(40): a, c, t, g, unknown or other
  modified_base (44)..(46): a, c, t, g, unknown or other
  modified_base (1289)..(1289): a, c, t, g, unknown or other
gnnagtcgagcgaagcagttaagaagattcttcggatgantctnnnctgactgagcggcggacgggtgagtaacgcgtgggtgacctgccccataccgggggataacagctggaaacggctgctaataccgcataagcgcacagagctgcatggctcggtgtgaaaaactccggtggtatgggatgggcccgcgtctgattaggcagttggcggggtaacggcccaccaaaccgacgatcagtagccggcctgagagggcgaccggccacattgggactgagacacggcccaaactcctacgggaggcagcagtggggaatattgcacaatgggggaaaccctgatgcagcgacgccgcgtgagcgaagaagtatttcggtatgtaaagctctatcagcagggaagataatgacggtacctgactaagaagccccggctaactacgtgccagcagccgcggtaatacgtagggggcaagcgttatccggatttactgggtgtaaagggaggcgtagacggcaaggcaagttctgatgtgaaaacccagggcttaaccctgggactgcattggaaactgtctggctcgagtgccggagaggtaagcggaattcctagtgtagcggtgaaatgcgtagatattaggaagaacaccagtggcgaaggcggcttactggacggtaactgacgttgaggctcgaaagcgtggggagcaaacaggattagataccctggtagtccacgccgtaaacgatgaatgctaggtgttggggagcaaagctcttcggtgccgccgcaaacgcattaagcattccacctggggagtacgttcgcaagaatgaaactcaaaggaattgacggggacccgcacaagcggtggagcatgtggtttaattctgaagcaacgcgaagaaccttaccaggtcttgacatcccgatgaccggttcgtaatggaaccttttttttggagcattggagacaggtggtgcatggttgttgtcagctcgtgttgtgagatgttgggttaagtcccgcaacgagcgcaacccttatcctcagtagccagcaagtaaagttgggccctttgtggagactgccagggataacctggaggaaggtggggatgacgtcaaatcatcatgccccttatgatttgggctacccacctgctacaatggcgtaaacaaagggaggcaaagccgcgaggtggagcaaatcccaaaaataacgtttcagtttggactgcagtttgcaacttgactgcacgaagctggaatcgctagtaatcgngaatcagaatgtcgcggtgaatacgttcccgggttttgtacaccccccccgtcacaccatgggagttggtaacgcccgaagtcagtgaccc

SEQ ID NO: 28 - DNA, 1395 bp, Oscillibacter sp.
  modified_base (10)..(10): a, c, t, g, unknown or other
  modified_base (315)..(316): a, c, t, g, unknown or other
  modified_base (333)..(333): a, c, t, g, unknown or other
  modified_base (401)..(402): a, c, t, g, unknown or other
  modified_base (406)..(406): a, c, t, g, unknown or other
  modified_base (451)..(451): a, c, t, g, unknown or other
tgcagtcgancggagcacccttgactgaggtttcggccaaatgataggaatgcttagtggcggactggtgagtaacgcgtgaggaacctgcctttcagagggggacaacagttggaaacgactgctaataccgcatgatgcgtaactgggacatcccggatacgccaaagattttatcgctgaaaaatggcctcgcgtctgattagatagttgggggggtaacggcccaccaagtcaacaatcagtagccggactgaaaggttgaccggccactttgggactgaaatacggcccaaactcctacgggaggcagcnntggggaatattgggcantgggcgcaagcctgacccaccaacgccgcgtgaaggaagaaggctttcgggttgtaaacttcttttanntggnaaaagtagaaaacggtaccacttgaataagccacggctaactacntgccagcagccgcggtaatacgtaggtggcaagcgttgtccggatttactgggtgtaaagggcgtgcagccgggcatgcaagtcagatgtgaaatctcagggcttaaccctgaaactgcatttgaaactgtatgtcttgagtgccggagaggtaatcggaattccttgtgtagcggtgaaatgcgtagatataaggaagaacaccagtggcgaaggcggattactggacggtaactgacggtgaggcgcgaaagcgtggggagcgaacaggattagataccctggtagtccacgctgtaaacgatggatactaggtgtgcggggactgaccccctgcgtgccgcagttaacacaataagtatcccacctggggagtacgatcgcaaggttgaaactcaaaggaattgacgggggcccgcacaagcggtggattatgtggtttaattcgaagcaacgcgaagaaccttaccaggtcttgacatcctgctaacgaagtagagatacattaggtgcccttcggggaaagcagagacaggtggtgcatggttgtcgtcagctcgtgtcgtgagatgttgggttaagtcccgcaacgagcgcaacccctattgttagttgctacgcaagagcactctagcgagactgccgttgacaaaacggaggaaggtggggacgacgtcaaatcatcatgccccttatgacctgggctacacacgtaatacaatggcggtcaacaaagggatgcgaagccgcgaggcagagcgaaccccaaaaagccgtcccagttcggatcgcaggctgcaacccgcctgcgtgaagtcggaatcgctagtaatcgtgggtcagcataccacggtgaatacgttcccgggccttgtacacaccgcccgtcacaccatgagagtcgggaacacccgaagtccgtagcctaaccgcaaggagggcgc

SEQ ID NO: 29 - DNA, 1392 bp, Parabacteroides distasonis
  modified_base (10)..(10): a, c, t, g, unknown or other
  modified_base (17)..(17): a, c, t, g, unknown or other
  modified_base (26)..(28): a, c, t, g, unknown or other
  modified_base (30)..(30): a, c, t, g, unknown or other
  modified_base (32)..(32): a, c, t, g, unknown or other
  modified_base (34)..(34): a, c, t, g, unknown or other
  modified_base (1072)..(1072): a, c, t, g, unknown or other
  modified_base (1074)..(1074): a, c, t, g, unknown or other
cagtcgaggngcagcgnggggtggcnnngncncnccggcgaccggcgcacgggtgagtaacgcgtatgcaacttgcctatcagagggggataacccggcgaaagtcggactaataccgcatgaagcaggggccccgcatggggatatttgctaaagattcatcgctgatagataggcatgcgttccattaggcagttggcggggtaacggcccaccaaaccgacgatggataggggttctgagaggaaggtcccccacattggtactgagacacggaccaaactcaaacgggaggcagcagtgaggaatattggtcaatggccgagaggctgaaccagccaagtcgcgtgagggatgaaggttctatggatcgtaaacctcttttataagggaataaagtgcgggacgtgtcccgttttgtatgtaccttatgaataaggatcggctaactccgtgccagcagccgcggtaatacggaggatccgagcgttatccggatttattgggtttaaagggtgcgtaggcggccttttaagtcagcggtgaaagtctgtggctcaaccatagaattgccgttgaaactggggggcttgagtatgtttgaggcaggcggaatgcgtggtgtagcggtgaaatgcatagatatcacgcagaaccccgattgcgaaggcagcctgccaagccatgactgacgctgatgcacgaaagcgtggggatcaaacaggattagataccctggtagtccacgcagtaaacgatgatcactagctgtttgcgatacactgtaagcggcacagcgaaagcgttaagtgatccacctggggagtacgccggcaacggtgaaactcaaaggaattgacgggggcccgcacaagcggaggaacatgtggtttaattcgatgatacgcgaggaaccttacccgggtttgaacgcattcggaccgaggtggaaacaccttttctagcaatagccgtttgcgaggtgctgcatggttgtcgtcagctcgtgccgtgaggtgtcggcttaagtgccataacgagcgcaacccttgccactagttactaacaggtnangctgaggactctggtgggactgccagcgtaagctgcgaggaaggcggggatgacgtcaaatcagcacggcccttacatccggggcgacacacgtgttacaatggcgtggacaaagggaggccacctggcgacagggagcgaatccccaaaccacgtctcagttcggatcggagtctgcaacccgactccgtgaagctggattcgctagtaatcgcgcatcagccatggcgcggtgaatacgttcccgggccttgtacacaccgcccgtcaagccatgggagccgggggtacctgaagtccgtaaccgcgaggatcggc

SEQ ID NO: 30 - DNA, 1376 bp, Eggerthella lenta
  modified_base (10)..(10): a, c, t, g, unknown or other
  modified_base (131)..(132): a, c, t, g, unknown or other
  modified_base (1375)..(1375): a, c, t, g, unknown or other
tgcagtcgancgatgaaccgccctcgggcggacatgaagtggcgaacgggtgagtaacacgtgaccaacctgcccccctctccgggacaaccttgggaaaccgaggctaataccggatactccctcccctnntcctgcaggggtcgggaaagcccaggcggagggggatggggtcgcggcccattaggtagtaggcggggtaacggcccacctagcccgcgatgggtagccgggttgagagaccgaccggccacattgggactgagatacggcccagactcctacgggaggcagcagtggggaattttgcgcaatgggggcaaccctgacgcagcaacgccgcgtgcgggacgacggcctttcgggttgtaaaccgctttcagcagggaagaaattcgacggtacctgcagaagaagctccggctaactacgtgccagcagccgcggtaatacgtagggagcgagcgttatccggattcattgggcgtaaagagcgcgtaggcggcctctcaagcgggatctctaatccgagggctcaacccccggccggatcccgaactgggaggctcgagttcggtagaggcaggcggaattcccggtgtagcggtggaatgcgcagatatcgggaagaacaccgatggcgaaggcagcctgctgggccgcaactgacgctgaggcgcgaaagctaggggagcgaacaggattagataccctggtagtcctagccgtaaacgatggatactaggtgtggggggctccgccctccgtgccgcagccaacgcattaagtatcccgcctggggagtacggccgcaaggctaaaactcaaaggaattgacgggggcccgcacaagcagcggagcatgtggcttaattcgaagcaacgcgaagaaccttaccagggcttgacatggacgtgaagccggggaaacccggtggccgagaggagcgtccgcaggtggtgcatggctgtcgtcagctcgtgtcgtgagatgttgggttaagtcccgcaacgagcgcaacccctgccccatgttgccagcattaggttggggactcatgggggactgccggcgtcaagccggaggaaggtggggacgacgtcaagtcatcatgccctttatgccctgggctgcacacgtgctacaatggccggtacaacgggctgcgagaccgcgaggtcgagcgaatccctcaaagccggccccagttcggatcggaggctgcaacccgcctccgtgaagtcggagttgctagtaatcgcggatcagcatgccgcggtgaatacgttcccgggccttgtacacaccgcccgtcacaccacccgagtcgtctgcacccgaagccgccggccgaacccgcaaggggcggaggcnt

SEQ ID NO: 31 - DNA, 1407 bp, Unknown
  Description of Unknown: Enterobacter hormaechei sequence
  modified_base (3)..(3): a, c, t, g, unknown or other
  modified_base (363)..(363): a, c, t, g, unknown or other
  modified_base (1385)..(1385): a, c, t, g, unknown or other
tgnaagtcgaacggtaacaggaagcagcttgctgcttcgctgacgagtggcggacgggtgagtaatgtctgggaaactgcctgatggagggggataactactggaaacggtagctaataccgcataacgtcgcaagaccaaagagggggaccttcgggcctcttgccatcggatgtgcccagatgggattagctagtaggtggggtaacggctcacctaggcgacgatccctagctggtctgagaggatgaccagccacactggaactgagacacggtccagactcctacgggaggcagcagtggggaatattgcacaatgggcgcaagcctgatgcagccatgccgcgtgtatgaagaaggncttcgggttgtaaagtactttcagcggggaggaaggcgataaggttaataaccttgtcgattgacgttacccgcagaagaagcaccggctaactccgtgccagcagccgcggtaatacggagggtgcaagcgttaatcggaattactgggcgtaaagcgcacgcaggcggtctgtcaagtcggatgtgaaatccccgggctcaacctgggaactgcattcgaaactggcaggctagagtcttgtagaggggggtagaattccaggtgtagcggtgaaatgcgtagagatctggaggaataccggtggcgaaggcggccccctggacaaagactgacgctcaggtgcgaaagcgtggggagcaaacaggattagataccctggtagtccacgccgtaaacgatgtcgacttggaggttgtgcccttgaggcgtggcttccggagctaacgcgttaagtcgaccgcctggggagtacggccgcaaggttaaaactcaaatgaattgacgggggcccgcacaagcggtggagcatgtggtttaattcgatgcaacgcgaagaaccttacctactcttgacatccagagaactttccagagatggattggtgccttcgggaactctgagacaggtgctgcatggctgtcgtcagctcgtgttgtgaaatgttgggttaagtcccgcaacgagcgcaacccttatcctttgttgccagcggtccggccgggaactcaaaggagactgccagtgataaactggaggaaggtggggatgacgtcaagtcatcatggcccttacgagtagggctacacacgtgctacaatggcgcatacaaagagaagcgacctcgcgagagcaagcggacctcataaagtgcgtcgtagtccggattggagtctgcaactcgactccatgaagtcggaatcgctagtaatcgtggatcagaatgccacggtgaatacgttcccgggccttgtacacaccgcccgtcacaccatgggagtgggttgcaaaagaagtaggnagcttaaccttcgggagggcgc

SEQ ID NO: 32 - DNA, 1391 bp, Anaerostipes hadrus
  modified_base (1369)..(1371): a, c, t, g, unknown or other
tcgaacgaaacaccttatttgattttcttcggaactgaagatttggtgattgagtggcggacgggtgagtaacgcgtgggtaacctgccctgtacagggggataacagtcagaaatgactgctaataccgcataagaccacagcaccgcatggtgcaggggtaaaaactccggtggtacaggatggacccgcgtctgattagctggttggtgaggtaacggctcaccaaggcgacgatcagtagccggcttgagagagtgaacggccacattgggactgagacacggcccaaactcctacgggaggcagcagtggggaatattgcacaatgggggaaaccctgatgcagcgacgccgcgtgagtgaagaagtatctcggtatgtaaagctctatcagcagggaagaaaatgacggtacctgactaagaagccccggctaactacgtgccagcagccgcggtaatacgtagggggcaagcgttatccggaattactgggtgtaaagggtgcgtaggtggtatggcaagtcagaagtgaaaacccagggcttaactctgggactgcttttgaaactgtcagactggagtgcaggagaggtaagcggaattcctagtgtagcggtgaaatgcgtagatattaggaggaacatcagtggcgaaggcggcttactggactgaaactgacactgaggcacgaaagcgtggggagcaaacaggattagataccctggtagtccacgccgtaaacgatgaatactaggtgtcggggccgtagaggcttcggtgccgcagccaacgcagtaagtattccacctggggagtacgttcgcaagaatgaaactcaaaggaattgacggggacccgcacaagcggtggagcatgtggtttaattcgaagcaacgcgaagaaccttacctggtcttgacatccttctgaccggtccttaaccggacctttccttcgggacaggagtgacaggtggtgcatggttgtcgtcagctcgtgtcgtgagatgttgggttaagtcccgcaacgagcgcaacccctatctttagtagccagcatataaggtgggcactctagagagactgccagggataacctggaggaaggtggggacgacgtcaaatcatcatgccccttatgaccagggctacacacgtgctacaatggcgtaaacagagggaagcagcctcgtgagagtgagcaaatcccaaaaataacgtctcagttcggattgtagtctgcaactcgactacatgaagctggaatcgctagtaatcgcgaatcagaatgtcgcggtgaatacgttcccgggtcttgtacacaccgcccgtcacaccatgggagtcagtaacgcccgaagtcannnacccaaccgtaaggagggag

SEQ ID NO: 33 - DNA, 1400 bp, Unknown
  Description of Unknown: Lachnospiraceae sp. FBI00033 sequence
  modified_base (6)..(7): a, c, t, g, unknown or other
  modified_base (24)..(24): a, c, t, g, unknown or other
  modified_base (27)..(28): a, c, t, g, unknown or other
  modified_base (51)..(51): a, c, t, g, unknown or other
  modified_base (948)..(951): a, c, t, g, unknown or other
  modified_base (1396)..(1397): a, c, t, g, unknown or other
cctacnntgcagtcgacgaggtanttnngattgaagttttcggatggattntcaagataccgagtggcggacgggtgagtaacgcgtgggtaacctgcctcatacagggggataacggttagaaatgactgctaataccgcataagcgcacagtaccgcatggtacggtgtgaaaaactccggtggtatgagatggacccgcgtctgattagctagttggtggggtaacggcccaccaaggcgacgatcagtagccgacctgagagggtgaccggccacattgggactgagacacggcccagactcctacgggaggcagcagtgggggatattgcacaatggaggaaactctgatgcagcgacgccgcgtgagtgaagaagtatttcggtatgtaaagctctatcagcagggaagaaaatgacggtacctgactaagaagccccggctaactacgtgccagcagccgcggtaatacgtagggggcaagcgttatccggatttactgggtgtaaagggagcgtagacggcgacgcaagtctgaagtgaaatacccgggctcaacctgggaactgctttggaaactgtgttgctagagtgctggagaggtaagcggaattcctagtgtagcggtgaaatgcgtagatattaggaagaacaccagtggcgaaggcggcttactggacagtaactgacgttgaggctcgaaagcgtggggagcaaacaggattagataccctggtagtccacgccgtaaacgatgaatactaggtgttggtgagcaaagctcatcggtgccgccgcaaacgcaataagtattccacctggggagtacgttcgcaagaatgaaactcaaaggaattgacggggacccgcacaagcggtggagcatgtggtttaattcgaagcaacgcgaagaaccttaccaaatcttgacatccctctgaaannnntaatcgagtgcctccttcgggacagaggtgacaggtggtgcatggttgtcgtcagctcgtgtcgtgagatgttgggttaagtcccgcaacgagcgcaacccctattgtcagtagccagcaggtaaagctgggcactctgatgagactgccagggataacctggaggaaggtggggatgacgtcaaatcatcatgccccttatgatttgggctacacacgtgctacaatggcgtaaacaaagagaagcgagcctgtgagggggagcaaatctcaaaaataacgtctcagttcggattgtagtctgcaactcgactacatgaagctggaatcgctagtaatcgcagatcagaatgctgcggtgaatacgttcccgggtcttgtacacaccgcccgtcacaccatgggagtcggaaatgcccgaagccagtgacccaagcgaaagcanngag

SEQ ID NO: 34 - DNA, 1392 bp, Eubacterium eligens
  modified_base (2)..(2): a, c, t, g, unknown or other
  modified_base (20)..(20): a, c, t, g, unknown or other
  modified_base (43)..(44): a, c, t, g, unknown or other
  modified_base (779)..(779): a, c, t, g, unknown or other
antcgaacgaagcatttacnacagatttcttcggattgaagtnntttatgactgagtggcggacgggtgagtaacgcgtgggtaacctgccttgtactgggggatagcagctggaaacggctggtaataccgcataagcgcacaatgttgcatgacatggtgtgaaaaactccggtggtataagatggacccgcgtctgattagctagttggtgagataacagcccaccaaggcgacgatcagtagccgacctgagagggtgaccggccacattgggactgagacacggcccagactcctacgggaggcagcagtggggaatattgcacaatggaggaaactctgatgcagcgacgccgcgtgagtgaagaagtaattcgttatgtaaagctctatcagcagggaagatagtgacggtacctgactaagaagctccggctaaatacgtgccagcagccgcggtaatacgtatggagcaagcgttatccggatttactgggtgtaaagggagtgtaggtggccatgcaagtcagaagtgaaaatccggggctcaaccccggaactgcttttgaaactgtaaggctggagtgcaggaggggtgagtggaattcctagtgtagcggtgaaatgcgtagatattaggaggaacaccagtggcgaaggcggctcactggactgtaactgacactgaggctcgaaagcgtggggagcaaacaggattagataccctggtagtccacgccgtaaacgatgaatactaggtgtcggggctcataagngcttcggtgccgcagcaaacgcaataagtattccacctggggagtacgttcgcaagaatgaaactcaaaggaattgacggggacccgcacaagcggtggagcatgtggtttaattcgaagcaacgcgaagaaccttaccaagtcttgacatcccactgaccggacagtaatgtgtcctttccttcgggacagtggtgacaggtggtgcatggttgtcgtcagctcgtgtcgtgagatgttgggttaagtcccgcaacgagcgcaacccctatccttagtagccagcagtaagatgggcactctagggagactgccagggataacctggaggaaggtggggatgacgtcaaatcatcatgccccttatgacttgggctacacacgtgctacaatggcgtaaacaaagtgaagcgaagtcgtgaggccaagcaaatcacaaaaataacgtctcagttcggattgtagtctgcaactcgactacatgaagctggaatcgctagtaatcgcagatcagaatgctgcggtgaatacgttcccgggtcttgtacacaccgcccgtcacaccatgggagtcgaaaatgcccgaagtcggtgacctaacgtaagaaggagc

SEQ ID NO: 35 - DNA, 1249 bp, Enterococcus casseliflavus
  modified_base (1)..(10): a, c, t, g, unknown or other
  modified_base (13)..(13): a, c, t, g, unknown or other
  modified_base (22)..(23): a, c, t, g, unknown or other
  modified_base (704)..(704): a, c, t, g, unknown or other
  modified_base (876)..(876): a, c, t, g, unknown or other
  modified_base (894)..(894): a, c, t, g, unknown or other
  modified_base (896)..(896): a, c, t, g, unknown or other
  modified_base (921)..(921): a, c, t, g, unknown or other
  modified_base (951)..(952): a, c, t, g, unknown or other
  modified_base (962)..(964): a, c, t, g, unknown or other
  modified_base (976)..(976): a, c, t, g, unknown or other
  modified_base (985)..(985): a, c, t, g, unknown or other
  modified_base (1006)..(1006): a, c, t, g, unknown or other
  modified_base (1029)..(1029): a, c, t, g, unknown or other
  modified_base (1035)..(1038): a, c, t, g, unknown or other
  modified_base (1049)..(1049): a, c, t, g, unknown or other
  modified_base (1051)..(1051): a, c, t, g, unknown or other
  modified_base (1053)..(1053): a, c, t, g, unknown or other
  modified_base (1057)..(1057): a, c, t, g, unknown or other
  modified_base (1061)..(1061): a, c, t, g, unknown or other
  modified_base (1074)..(1075): a, c, t, g, unknown or other
  modified_base (1077)..(1078): a, c, t, g, unknown or other
  modified_base (1080)..(1080): a, c, t, g, unknown or other
  modified_base (1085)..(1085): a, c, t, g, unknown or other
  modified_base (1087)..(1087): a, c, t, g, unknown or other
  modified_base (1089)..(1089): a, c, t, g, unknown or other
  modified_base (1092)..(1094): a, c, t, g, unknown or other
  modified_base (1096)..(1096): a, c, t, g, unknown or other
  modified_base (1098)..(1098): a, c, t, g, unknown or other
  modified_base (1102)..(1102): a, c, t, g, unknown or other
  modified_base (1104)..(1104): a, c, t, g, unknown or other
  modified_base (1106)..(1108): a, c, t, g, unknown or other
  modified_base (1111)..(1111): a, c, t, g, unknown or other
  modified_base (1120)..(1120): a, c, t, g, unknown or other
  modified_base (1125)..(1129): a, c, t, g, unknown or other
  modified_base (1132)..(1137): a, c, t, g, unknown or other
  modified_base (1140)..(1142): a, c, t, g, unknown or other
  modified_base (1146)..(1147): a, c, t, g, unknown or other
  modified_base (1150)..(1150): a, c, t, g, unknown or other
  modified_base (1154)..(1154): a, c, t, g, unknown or other
  modified_base (1156)..(1156): a, c, t, g, unknown or other
  modified_base (1163)..(1163): a, c, t, g, unknown or other
  modified_base (1168)..(1171): a, c, t, g, unknown or other
  modified_base (1174)..(1174): a, c, t, g, unknown or other
  modified_base (1177)..(1183): a, c, t, g, unknown or other
  modified_base (1185)..(1188): a, c, t, g, unknown or other
  modified_base (1190)..(1202): a, c, t, g, unknown or other
  modified_base (1204)..(1205): a, c, t, g, unknown or other
  modified_base (1208)..(1210): a, c, t, g, unknown or other
  modified_base (1212)..(1213): a, c, t, g, unknown or other
  modified_base (1215)..(1217): a, c, t, g, unknown or other
  modified_base (1219)..(1231): a, c, t, g, unknown or other
  modified_base (1233)..(1237): a, c, t, g, unknown or other
  modified_base (1239)..(1240): a, c, t, g, unknown or other
  modified_base (1242)..(1243): a, c, t, g, unknown or other
  modified_base (1245)..(1249): a, c, t, g, unknown or other
nnnnnnnnnnacntgcagtcgnncgctttttctttcaccggagcttgctccatcgaaagaaaaagagtggcgaacgggtgagtaacacgtgggtaacctgcccatcagaaggggataacacttggaaacaggtgctaataccgtataacactattttccgcatggaagaaagttgaaaggcgcttttgcgtcactgatggatggacccgcggtgcattagctagttggtgaggtaacggctcaccaaggcaacgatgcatagccgacctgagagggtgatcggccacactgggactgagacacggcccagactcctacgggaggcagcagtagggaatcttcggcaatggacgaaagtctgaccgagcaacgccgcgtgagtgaagaaggttttcggatcgtaaaactctgttgttagagaagaacaaggatgagagtaaaatgttcatcccttgacggtatctaaccagaaagccacggctaactacgtgccagcagccgcggtaatacgtaggtggcaagcgttgtccggatttattgggcgtaaagcgagcgcaggcggtttcttaagtctgatgtgaaagcccccggctcaaccggggagggtcattggaaactgggagacttgagtgcagaagaggagagtggaattccatgtgtagcggtgaaatgcgtagatatatggaggaacaccagtggcgaangcggctctctggtctgtaactgacgctgaggctcgaaagcgtggggagcgaacaggattagataccctggtagtccacgccgtaaacgatgagtgctaagtgttggagggtttccgcccttcagtgctgcagcaaacgcattaagcactccgcctggggagtacgaccgcanggttgaaactcaaaggantngacgggggcccgcacaagcggtggnagcatgtggtttaattcgaagcaacgcgannaaccttaccnnntcttgacatccnttgaccacntctagagatagagcttccccntcgggggcaaagtgacaggtggngcatgnnnncgtcagctcgngncntganatgntggttaagtcccnnannancgcancntntgnnntncntcantnannnggnactctagcnagacnnnnngannnnnngannngggnngangtcnantcatcangcccnnnnacnggnnnnnnncnnnntnnnnnnnnnnnnntnnaannncnngnnnannnnnnnnnnnnnannnnntnntnntnnnnn

SEQ ID NO: 36 - DNA, 1356 bp, Blautia faecis
  modified_base (3)..(4): a, c, t, g, unknown or other
  modified_base (34)..(35): a, c, t, g, unknown or other
  modified_base (329)..(329): a, c, t, g, unknown or other
  modified_base (1348)..(1349): a, c, t, g, unknown or other
ttnntttgtttctagtggcggacgggtgagtaanncgtgggtaacctgccttatactgggggataacagccagaaatgactgctaataccgcataagcgcacagaaccgcatggttccgtgtgaaaaactccggtggtataagatggacccgcgttggattagctagttggcagggcagcggcctaccaaggcgacgatccatagccggcctgagagggtgaacggccacattgggactgagacacggcccagactcctacgggaggcagcagtggggaatattgcacaatgggggaaaccctgatgcaacgacgccgcgtgaaggaanaagtatctcggtatgtaaacttctatcagcagggaagataatgacggtacctgactaagaagccccggctaactacgtgccagcagccgcggtaatacgtagggggcaagcgttatccggatttactgggtgtaaagggagcgtagacggcgcagcaagtctgatgtgaaaggcaggggcttaacccctggactgcattggaaactgctgtgcttgagtgccggaggggtaagcggaattcctagtgtagcggtgaaatgcgtagatattaggaggaacaccagtggcgaaggcggcttactggacggtaactgacgttgaggctcgaaagcgtggggagcaaacaggattagataccctggtagtccacgccgtaaacgatgaatactaggtgtcagggagcacagctctttggtgccgccgcaaacgcattaagtattccacctgggggagtacgttcgcaagaatgaaactcaaaggaattgacggggacccgcacaagcggtggagcatgtgggtttaattcgaagcaacgcgaagaaccttaccaaatcttgacatccctctgaccgggacttaaccgtccctttccttcgggacaggggagacaggtggtgcatggttgtcgtcagctcgtgtcgtgagatgttgggttaagtcccgcaacgagcgcaacccctatccttagtagccagcacgcagtggtgggcactctgaggagactgccagggataacctggaggaaggcggggatgacgtcaaatcatcatgccccttatgatttgggctacacacgtgctacaatggcgtaaacaaagggaagcgaacccgcgagggtgggcaaatctcaaaaataacgtcccagttcggactgcagtctgcaactcgactgcacgaagctggaatcgctagtaatcgcggatcagaatgccgcggtgaatacgttcccgggtcttgtacacaccgcccgtcacaccatgggagtcagtaacgcccgaagtcagtgacctaaccgcaanngaggagc

SEQ ID NO: 37 - DNA, 1424 bp, Enterococcus casseliflavus
  modified_base (7)..(10): a, c, t, g, unknown or other
  modified_base (23)..(23): a, c, t, g, unknown or other
  modified_base (1414)..(1414): a, c, t, g, unknown or other
  modified_base (1422)..(1422): a, c, t, g, unknown or other
tgcagtnnnngctttttctttcnccggagcttgctccaccgaaagaaaaagagtggcgaacgggtgagtaacacgtgggtaacctgcccatcagaaggggataacacttggaaacaggtgctaataccgtataacactattttccgcatggaagaaagttgaaaggcgcttttgcgtcactgatggatggacccgcggtgcattagctagttggtgaggtaacggctcaccaaggcaacgatgcatagccgacctgagagggtgatcggccacactgggactgagacacggcccagactcctacgggaggcagcagtagggaatcttcggcaatggacgaaagtctgaccgagcaacgccgcgtgagtgaagaaggttttcggatcgtaaaactctgttgttagagaagaacaaggatgagagtaaaatgttcatcccttgacggtatctaaccagaaagccacggctaactacgtgccagcagccgcggtaatacgtaggtggcaagcgttgtccggatttattgggcgtaaagcgagcgcaggcggtttcttaagtctgatgtgaaagcccccggctcaaccggggagggtcattggaaactgggagacttgagtgcagaagaggagagtggaattccatgtgtagcggtgaaatgcgtagatatatggaggaacaccagtggcgaaggcggctctctggtctgtaactgacgctgaggctcgaaagcgtggggagcgaacaggattagataccctggtagtccacgccgtaaacgatgagtgctaagtgttggagggtttccgcccttcagtgctgcagcaaacgcattaagcactccgcctggggagtacgaccgcaaggttgaaactcaaaggaattgacgggggcccgcacaagcggtggagcatgtggtttaattcgaagcaacgcgaagaaccttaccaggtcttgacatcctttgaccactctagagatagagcttccccttcgggggcaaagtgacaggtggtgcatggttgtcgtcagctcgtgtcgtgagatgttgggttaagtcccgcaacgagcgcaacccttattgttagttgccatcatttagttgggcactctagcgagactgccggtgacaaaccggaggaaggtggggatgacgtcaaatcatcatgccccttatgacctgggctacacacgtgctacaatgggaagtacaacgagttgcgaagtcgcgaggctaagctaatctcttaaagcttctctcagttcggattgtaggctgcaactcgcctacatgaagccggaatcgctagtaatcgcggatcagcacgccgcggtgaatacgttcccgggccttgtacacaccgcccgtcacaccacgagagtttgtaacacccgaagtcggtgaggtaaccttttnggagccancc

SEQ ID NO: 38 - DNA, 1382 bp, Coprococcus eutactus
  modified_base (1246)..(1246): a, c, t, g, unknown or other
tgcagtcgacgagagaagattggtgcttgcactgatccgatcgagtggcggacgggtgagtaacgcgtgggtaacctgcctcatacaggggaataacagttggaaacggctgctaaaaccgcataagcgcacggaatcgcatgatacagtgtgaaaaactccggtggtatgagatggacccgcgtctgattagctagttggtgaggtaacggcccaccaaggcaacgatcagtagccggcctgagagggtgaacggccacattgggactgagacacggcccaaactcctacgggaggcagcagtggggaatattgcacaatgggggaaaccctgatgcagcgacgccgcgtgagtgatgaagtatttcggtatgtaaagctctatcagcagggaagataatgacggtacctgactaagaagcaccggctaaatacgtgccagcagccgcggtaatacgtatggtgcaagcgttatccggatttactgggtgtaaagggtgcgtaggtggtgagacaagtctgaagtgaaaatccggggcttaaccccggaactgctttggaaactgcctgactagagtacaggagaggtaagtggaattcctagtgtagcggtgaaatgcgtagatattaggaggaacaccagtggcgaaggcgacttactggactgctactgacactgaggcacgaaagcgtggggagcaaacaggattagataccctggtagtccacgccgtaaacgatgaatactaggtgtcggggcccaaagggcttcggtgccgcagccaacgcaataagtattccacctggggagtacgttcgcaagaatgaaactcaaaggaattgacggggacccgcacaagcggtggagcatgtggtttaattcgaagcaacgcgaagaaccttaccaagtcttgacatcctgctgaccgttccttaaccggaattttccttcgggacagcagagacaggtggtgcatggttgtcgtcagctcgtgtcgtgagatgttgggttaagtcccgcaacgagcgcaacccctatttccagtagccagcagtcagatgggcactctggagagactgccggggataacccggaggaaggtggggatgacgtcaaatcatcatgccccttatgatttgggctacacacgtgctacaatggcagttacaaagagaagcgaaactgtgaagtggagcaaacctcaaaaaggctgtctcagttcggattgtagtctgcaactcgacnacatgaagctggaatcgctagtaatcgcagatcagaatgctgcggtgaatacgttcccgggtcttgtacacaccgcccgtcacaccatgggagtcggaaacgcccgaagtcagtgacccaaccgcaaggagggagc

SEQ ID NO: 39 - DNA, 1389 bp, Bacteroides vulgatus
  modified_base (1388)..(1388): a, c, t, g, unknown or other
tcgaggggcagcatggtcttagcttgctaaggccgatggcgaccggcgcacgggtgagtaacacgtatccaacctgccgtctactcttggacagccttctgaaaggaagattaatacaagatggcatcatgagtccgcatgttcacatgattaaaggtattccggtagacgatggggatgcgttccattagatagtaggcggggtaacggcccacctagtcttcgatggataggggttctgagaggaaggtcccccacattggaactgagacacggtccaaactcatacgggaggcagcagtgaggaatattggtcaatgggcgagagcctgaaccagccaagtagcgtgaaggatgactgccctatgggttgtaaacttcttttataaaggaataaagtcgggtatgcatacccgtttgcatgtactttatgaataaggatcggctaactccgtgccagcagccgcggtaatacggaggatccgagcgttatccggatttattgggtttaaagggagcgtagatggatgtttaagtcagttgtgaaagtttgcggctcaaccgtaaaattgcagttgatactggatatcttgagtgcagttgaggcaggcggaattcgtggtgtagcggtgaaatgcttagatatcacgaagaactccgattgcgaaggcagcctgctaagctgcaactgacattgaggctcgaaagtgtgggtatcaaacaggattagataccctggtagtccacacggtaaacgatgaatactcgctgtttgcgatatacagcaagcggccaagcgaaagcgttaagtattccacctggggagtacgccggcaacggtgaaactcaaaggaattgacgggggcccgcacaagcggaggaacatgtggtttaattcgatgatacgcgaggaaccttacccgggcttaaattgcagatgaattacggtgaaagccgtaagccgcaaggcatctgtgaaggtgctgcatggttgtcgtcagctcgtgccgtgaggtgtcggcttaagtgccataacgagcgcaacccttgttgtcagttactaacaggttctgctgaggactctgacaagactgccatcgtaagatgtgaggaaggtggggatgacgtcaaatcagcacggcccttacgtccggggctacacacgtgttacaatggggggtacagagggccgctaccacgcgagtggatgccaatccccaaaacctctctcagttcggactggagtctgcaacccgactccacgaagctggattcgctagtaatcgcgcatcagccacggcgcggtgaatacgttcccgggccttgtacacaccgcccgtcaagccatgggagccgggggtacctgaagtgcgtaaccgcgaggagcnc

SEQ ID NO: 40 - DNA, 1400 bp, Bilophila wadsworthia
  modified_base (26)..(26): a, c, t, g, unknown or other
  modified_base (1397)..(1397): a, c, t, g, unknown or other
gtcgaacgtgaaagtccttcgggacnagtaaagtggcgcacgggtgagtaacgcgtggataatctacccttaagatggggataacggctggaaacggtcgctaataccgaatacgctcccgattttatcattggggggaaagatggcctctgcttgcaagctatcgcttaaggatgagtccgcgtcccattagctagttggcggggtaacggcccaccaaggcaacgatgggtagccggtctgagaggatgaccggccacactggaactggaacacggtccaaactcctacgggaggcagcagtggggaatattgcgcaatgggcgaaagcctgacgcagcgacgccgcgtgagggatgaaggttctcggatcgtaaacctctgtcaggggggaaaaaaccccctcgtgtgaataatgcgagggcttgacggtacccccaaaggaagcaccggctaactccgtgccagcagccgcggtaatacggagggtgcaagcgttaatcggaatcactgggcgtaaagcgcacgtaggcggcttggtaagtcaggggtgaaatcccacagcccaactgtggaactgcctttgatactgccaggcttgagtaccggagagggtggcggaattccaggtgtaggagtgaaatccgtagatatctggaggaacaccggtggcgaaggcggccacctggacggtaactgacgctgaggtgcgaaagcgtgggtagcaaacaggattagataccctggtagtccacgctgtaaacgatgggtgctgggtgctgggatgtatgtctcggtgccgtagctaacgcgataagcaccccgcctggggagtacggtcgcaaggctgaaactcaaagaaattgacgggggcccgcacaagcggtggagtatgtggtttaattcgatgcaacgcgaagaaccttacccaggcttgacatctagggaacccttcggaaatgaaggggtgcccttcggggagccctaagacaggtgctgcatggctgtcgtcagctcgtgccgtgaggtgttgggttaagtcccgcaacgagcgcaacccctatcttcagttgccagcaggtaaggctgggcactctggagagaccgccccggtcaacggggaggaaggtggggacgacgtcaagtcatcatggcccttacgcctggggctacacacgtactacaatggcgcgcacaaagggtagcgagaccgcgaggtggagccaatcccaaaaaacgcgtcccagtccggattggagtctgcaactcgactccatgaagtcggaatcgctagtaattcgagatcagcatgctcgggtgaatgcgttcccgggccttgtacacaccgcccgtcacaccacgaaagtcggttttacccgaagccggtgagctaactntgc

SEQ ID NO: 41 - DNA, 1428 bp, Phascolarctobacterium faecium
  modified_base (4)..(6): a, c, t, g, unknown or other
  modified_base (225)..(225): a, c, t, g, unknown or other
  modified_base (1411)..(1411): a, c, t, g, unknown or other
  modified_base (1416)..(1417): a, c, t, g, unknown or other
tgcnnntcgaacggagaattttatttcggtagaattcttagtggcgaacgggtgagtaacgcgtaggcgacctgccctttagacggggacaacattccgaaaggagtgctaataccggatgtgatcatcttgccgcatggcaggatgaagaaagatggcctctacaagtaagctatcgctaaaggatgggcctgcgtctgattagctagttggtagtgtaacggnctaccaaggcgatgatcagtagccggtctgagaggatgaacggccacattgggactgagacacggcccaaactcatacgggaggcagcagtggggaatcttccgcaatggacgaaagtctgacggagcaacgccgcgtgagtgatgaaggatttcggtctgtaaagctctgttgtttatgacgaacgtgcagtgtgtgaacaatgcattgcaatgacggtagtaaacgaggaagccacggctaactacgtgccagcagccgcggtaatacgtaggtggcgagcgttgtccggaattattgggcgtaaagagcatgtaggcggcttaataagtcgagcgtgaaaatgcggggctcaaccccgtatggcgctggaaactgttaggcttgagtgcaggagaggaaaggggaattcccagtgtagcggtgaaatgcgtagatattgggaggaacaccagtggcgaaggcgcctttctggactgtgtctgacgctgagatgcgaaagccagggtagcgaacgggattagataccccggtagtcctggccgtaaacgatgggtactaggtgtaggaggtatcgaccccttctgtgccggagttaacgcaataagtaccccgcctggggagtacggccgcaaggttgaaactcaaaggaattgacgggggcccgcacaagcggtggagtatgtggtttaattcgacgcaacgcgaagaaccttaccaaggcttgacattgattgaacgctctagagatagagatttcccttcggggacaagaaaacaggtggtgcatggctgtcgtcagctcgtgtcgtgagatgttgggttaagtcccgcaacgagcgcaacccctatcctatgttaccagcaagtaaagttggggactcatgggagactgccagggacaacctggaggaaggcggggatgacgtcaagtcatcatgccccttatgtcttgggctacacacgtactacaatggtcggaaacagagggaagcgaagccgcgaggcagagcaaaccccagaaacccgatctcagttcggatcgcaggctgcaacccgcctgcgtgaagtcggaatcgctagtaatcgcaggtcagcatactgcggtgaatacgttcccgggccttgtacacaccgcccgtcacaccacgaaagttggtaacacccgaagccggtgaggtaactntattnngagccagccgt

SEQ ID NO: 42 - DNA, 1394 bp, Bacteroides xylanisolvens
  modified_base (30)..(30): a, c, t, g, unknown or other
  modified_base (980)..(980): a, c, t, g, unknown or other
  modified_base (1390)..(1390): a, c, t, g, unknown or other
gcaagtcgaggggcagcattttagtttgcnttgcaaactaaagatggcgaccggcgcacgggtgagtaacacgtatccaacctgccgataactcggggatagcctttcgaaagaaagattaatatccgatagtatattaaaaccgcatggttttactattaaagaatttcggttatcgatggggatgcgttccattagtttgttggcggggtaacggcccaccaagactacgatggataggggttctgagaggaaggtcccccacattggaactgagacacggtccaaactcctacgggaggcagcagtgaggaatattggtcaatggacgagagtctgaaccagccaagtagcgtgaaggatgactgccctatgggttgtaaacttcttttatatgggaataaagtattccacgtgtggaattttgtatgtaccatatgaataaggatcggctaactccgtgccagcagccgcggtaatacggaggatccgagcgttatccggatttattgggtttaaagggagcgtaggtggattgttaagtcagttgtgaaagtttgcggctcaaccgtaaaattgcagttgaaactggcagtcttgagtacagtagaggtgggcggaattcgtggtgtagcggtgaaatgcttagatatcacgaagaactccgattgcgaaggcagctcactagactgcaactgacactgatgctcgaaagtgtgggtatcaaacaggattagataccctggtagtccacacagtaaacgatgaatactcgctgtttgcgatatacagtaagcggccaagcgaaagcattaagtattccacctggggagtacgccggcaacggtgaaactcaaaggaattgacgggggcccgcacaagcggaggaacatgtggtttaattcgatgatacgcgaggaaccttacccgggcttaaattgcaaatgaataatctggaaacaggttagccgcaaggcatntgtgaaggtgctgcatggttgtcgtcagctcgtgccgtgaggtgtcggcttaagtgccataacgagcgcaacccttatctttagttactaacaggttatgctgaggactctagagagactgccgtcgtaagatgtgaggaaggtggggatgacgtcaaatcagcacggcccttacgtccggggctacacacgtgttacaatggggggtacagaaggcagctacctggcgacaggatgctaatcccaaaaacctctctcagttcggatcgaagtctgcaacccgacttcgtgaagctggattcgctagtaatcgcgcatcagccatggcgcggtgaatacgttcccgggccttgtacacaccgcccgtcaagccatgaaagccgggggtacctgaagtacgtaaccgcaangagc

SEQ ID NO: 43 - DNA, 1391 bp, Bifidobacterium dentium
  modified_base (4)..(7): a, c, t, g, unknown or other
  modified_base (1389)..(1390): a, c, t, g, unknown or other
tttnnnntgcagtcgaacgggatcccgggggttcgctcccgggtgagagtggcgaacgggtgagtaatgcgtgaccgacctgccccatacaccggaatagctcctggaaacgggtggtaatgccggatgctccggttggatgcatgtccttccgggaaagattccatcggtatgggatggggtcgcgtcctatcagcttgatggcggggtaacggcccaccatggcctcgacgggtagccggcctgagagggcgaccggccacattgggactgagatacggcccagactcctacgggaggcagcagtggggaatattgcacaatgggcgcaagcctgatgcagcgacgccgcgtgcgggatggaggccttcgggttgtaaaccgcttttgatcgggagcaagcccttcggggtgagtgtacccttcgaataagcaccggctaactacgtgccagcagccgcggtaatacgtagggtgcaagcgttatccggaattattgggcgtaaagggctcgtaggcggttcgtcgcgtcccggtgtgaaagcccatcgcttaacggtgggtctgcgccgggtacgggcgggctggagtgcggtaggggagactggaattcccggtgtaacggtggaatgtgtagatatcgggaagaacaccaatggcgaaggcaggtctctgggccgtcactgacgctgaggagcgaaagcgtggggagcgaacaggattagataccctggtagtccacgccgtaaacggtggatgctggatgtggggcccgttccacgggttccgtgtcggagctaacgcgttaagcatcccgcctggggagtacggccgcaaggctaaaactcaaagaaattgacgggggcccgcacaagcggcggagcatgcggattaattcgatgcaacgcgaagaaccttacctgggcttgacatgttcccgacggtcgtagagatatggcctcccttcggggcgggttcacaggtggtgcatggtcgtcgtcagctcgtgtcgtgagatgttgggttaagtcccgcaacgagcgcaaccctcgccctgtgttgccagcacgtcgtggtgggaactcacgggggaccgccggggtcaactcggaggaaggtggggatgacgtcagatcatcatgccccttacgtccagggcttcacgcatgctacaatggccggtacagcgggatgcgacatggcgacatggagcggatccctgaaaaccggtctcagttcggattggagtctgcaacccgactccatgaaggcggagtcgctagtaatcgcggatcagcaacgccgcggtgaatgcgttcccgggccttgtacacaccgcccgtcaagtcatgaaagtgggcagcacccgaagccggtggcctaaccccnnt

SEQ ID NO: 44 - DNA, 1379 bp, Blautia wexlerae
  modified_base (4)..(4): a, c, t, g, unknown or other
  modified_base (10)..(10): a, c, t, g, unknown or other
  modified_base (919)..(919): a, c, t, g, unknown or other
  modified_base (921)..(921): a, c, t, g, unknown or other
  modified_base (1377)..(1378): a, c, t, g, unknown or other
ggantatttnattgagacttcggtggatttgatttatttctagtggcggacgggtgagtaacgcgtgggtaacctgccttatacagggggataacagtcagaaatggctgctaataccgcataagcgcacagagctgcatggctcagtgtgaaaaactccggtggtataagatggacccgcgttggattagcttgttggtggggtaacggcccaccaaggcgacgatccatagccggcctgagagggtgaacggccacattgggactgagacacggcccagactcctacgggaggcagcagtggggaatattgcacaatgggggaaaccctgatgcagcgacgccgcgtgaaggaagaagtatctcggtatgtaaacttctatcagcagggaagatagtgacggtacctgactaagaagccccggctaactacgtgccagcagccgcggtaatacgtagggggcaagcgttatccggatttactgggtgtaaagggagcgtagacggtgtggcaagtctgatgtgaaaggcatgggctcaacctgtggactgcattggaaactgtcatacttgagtgccggaggggtaagcggaattcctagtgtagcggtgaaatgcgtagatattaggaggaacaccagtggcgaaggcggcttactggacggtaactgacgttgaggctcgaaagcgtggggagcaaacaggattagataccctggtagtccacgccgtaaacgatgaatactaggtgtcggggagcatggctcttcggtgccgtcgcaaacgcagtaagtattccacctggggagtacgttcgcaagaatgaaactcaaaggaattgacggggacccgcacaagcggtggagcatgtggtttaattcgaagcaacgcgaagaaccttaccaagtcttgacatccncntgaccggtccttaaccggacctttccttcgggacaggggagacaggtggtgcatggttgtcgtcagctcgtgtcgtgagatgttgggttaagtcccgcaacgagcgcaacccctatcctcagtagccagcatttaaggtgggcactctggggagactgccagggataacctggaggaaggcggggatgacgtcaaatcatcatgccccttatgatttgggctacacacgtgctacaatggcgtaaacaaagggaagcgagatcgtgagatggagcaaatcccaaaaataacgtcccagttcggactgtagtctgcaacccgactacacgaagctggaatcgctagtaatcgcggatcagaatgccgcggtgaatacgttcccgggtcttgtacacaccgcccgtcacaccatgggagtcagtaacgcccgaagtcagtgacctaactgcaaagaanna

SEQ ID NO: 45 - DNA, 1373 bp, Bifidobacterium adolescentis
  modified_base (10)..(10): a, c, t, g, unknown or other
tgcagtcgancgggatcccaggagcttgctcctgggtgagagtggcgaacgggtgagtaatgcgtgaccgacctgccccatacaccggaatagctcctggaaacgggtggtaatgccggatgctccagttgaccgcatggtcttctgggaaagcttttgcggtatgggatggggtcgcgtcctatcagcttgatggcggggtaacggcccaccatggcttcgacgggtagccggcctgagagggcgaccggccacattgggactgagatacggcccagactcctacgggaggcagcagtggggaatattgcacaatgggcgcaagcctgatgcagcgacgccgcgtgcgggatgacggccttcgggttgtaaaccgcttttgactgggagcaagcccttcggggtgagtgtacctttcgaataagcaccggctaactacgtgccagcagccgcggtaatacgtagggtgcaagcgttatccggaattattgggcgtaaagggctcgtaggcggttcgtcgcgtccggtgtgaaagtccatcgcttaacggtggatccgcgccgggtacgggcgggcttgagtgcggtaggggagactggaattcccggtgtaacggtggaatgtgtagatatcgggaagaacaccaatggcgaaggcaggtctctgggccgtcactgacgctgaggagcgaaagcgtggggagcgaacaggattagataccctggtagtccacgccgtaaacggtggatgctggatgtggggaccattccacggtctccgtgtcggagccaacgcgttaagcatcccgcctggggagtacggccgcaaggctaaaactcaaagaaattgacgggggcccgcacaagcggcggagcatgcggattaattcgatgcaacgcgaagaaccttacctgggcttgacatgttcccgacagccgtagagatacggtctcccttcggggcgggttcacaggtggtgcatggtcgtcgtcagctcgtgtcgtgagatgttgggttaagtcccgcaacgagcgcaaccctcgccctgtgttgccagcacgtcgtggtgggaactcacgggggaccgccggggtcaactcggaggaaggtggggatgacgtcagatcatcatgccccttacgtccagggcttcacgcatgctacaatggccggtacaacgggatgcgacaccgcgaggtggagcggatcccttaaaaccggtctcagttcggattggagtctgcaacccgactccatgaaggcggagtcgctagtaatcgcggatcagcaacgccgcggtgaatgcgttcccgggccttgtacacaccgcccgtcaagtcatgaaagtgggtagcacccgaagccggtggccc

SEQ ID NO: 46 - DNA, 1393 bp, Bacteroides caccae
tgcagtcgaggggcatcagtttggtttgcttgcaaaccaaagctggcgaccggcgcacgggtgagtaacacgtatccaacctgcctcatactcggggatagcctttcgaaagaaagattaatatccgatagcatatatttcccgcatgggttttatattaaagaaattcggtatgagatggggatgcgttccattagtttgttggcggggtaacggcccaccaagactacgatggataggggttctgagaggaaggtcccccacattggaactgagacacggtccaaactcctacgggaggcagcagtgaggaatattggtcaatggacgcgagtctgaaccagccaagtagcgtgaaggatgactgccctatgggttgtaaacttcttttatatgggaataaagtggtccacgtgtggatttttgtatgtaccatatgaataaggatcggctaactccgtgccagcagccgcggtaatacggaggatccgagcgttatccggatttattgggtttaaagggagcgtaggcggattgttaagtcagttgtgaaagtttgcggctcaaccgtaaaattgcagttgatactggcagtcttgagtgcagtagaggtgggcggaattcgtggtgtagcggtgaaatgcttagatatcacgaagaactccgattgcgaaggcagctcactggagtgtaactgacgctgatgctcgaaagtgtgggtatcaaacaggattagataccctggtagtccacacagtaaacgatgaatactcgctgtttgcgatatacagtaagcggccaagcgaaagcattaagtattccacctggggagtacgccggcaacggtgaaactcaaaggaattgacgggggcccgcacaagcggaggaacatgtggtttaattcgatgatacgcgaggaaccttacccgggcttaaattgcaaatgaattatggggaaacccatacgccgcaaggcatttgtgaaggtgctgcatggttgtcgtcagctcgtgccgtgaggtgtcggcttaagtgccataacgagcgcaacccttatcttcagttactaacaggtcatgctgaggactctggagagactgccgtcgtaagatgtgaggaaggtggggatgacgtcaaatcagcacggcccttacgtccggggctacacacgtgttacaatggggggtacagaaggccgctacctggtgacaggatgccaatcccaaaaacctctctcagttcggatcgaagtctgcaacccgacttcgtgaagctggattcgctagtaatcgcgcatcagccatggcgcggtgaatacgttcccgggccttgtacacaccgcccgtcaagccatgaaagccgggggtacctgaagtacgtaaccgcaaggagc

SEQ ID NO: 47 - DNA, 1410 bp, Eubacterium eligens
  modified_base (2)..(3): a, c, t, g, unknown or other
  modified_base (27)..(27): a, c, t, g, unknown or other
  modified_base (33)..(33): a, c, t, g, unknown or other
  modified_base (48)..(48): a, c, t, g, unknown or other
  modified_base (56)..(57): a, c, t, g, unknown or other
anncatgcagtcgaacgaagcatttangaacangattacttcggtgtntgaagttnnttatgactgagtggcggacgggtgagtaacgcgtgggtaacctgccttgtactgggggatagcagctggaaacggctggtaataccgcataagcgcacaatgttgcatgacatggtgtgaaaaactccggtggtataagatggacccgcgtctgattagctagttggtgagataacagcccaccaaggcgacgatcagtagccgacctgagagggtgaccggccacattgggactgagacacggcccagactcctacgggaggcagcagtggggaatattgcacaatggaggaaactctgatgcagcgacgccgcgtgagtgaagaagtaattcgttatgtaaagctctatcagcagggaagatagtgacggtacctgactaagaagctccggctaaatacgtgccagcagccgcggtaatacgtatggagcaagcgttatccggatttactgggtgtaaagggagtgtaggtggccatgcaagtcagaagtgaaaatccggggctcaaccccggaactgcttttgaaactgtaaggctggagtgcaggaggggtgagtggaattcctagtgtagcggtgaaatgcgtagatattaggaggaacaccagtggcgaaggcggctcactggactgtaactgacactgaggctcgaaagcgtggggagcaaacaggattagataccctggtagtccacgccgtaaacgatgaatactaggtgtcggggcccataagggcttcggtgccgcagcaaacgcaataagtattccacctggggagtacgttcgcaagaatgaaactcaaaggaattgacggggacccgcacaagcggtggagcatgtggtttaattcgaagcaacgcgaagaaccttaccaagtcttgacatcccactgaccggacagtaatgtgtcctttccttcgggacagtggtgacaggtggtgcatggttgtcgtcagctcgtgtcgtgagatgttgggttaagtcccgcaacgagcgcaacccctatccttagtagccagcagtaagatgggcactctagggagactgccagggataacctggaggaaggtggggatgacgtcaaatcatcatgccccttatgacttgggctacacacgtgctacaatggcgtaaacaaagtgaagcgaagtcgtgaggccaagcaaatcacaaaaataacgtctcagttcggattgtagtctgcaactcgactacatgaagctggaatcgctagtaatcgcagatcagaatgctgcggtgaatacgttcccgggtcttgtacacaccgcccgtcacaccatgggagtcgaaaatgcccgaagtcggtgacctaacgaaagaaggagccgccga

SEQ ID NO: 48 - DNA, 1377 bp, Unknown
  Description of Unknown: Fusicatenibacter saccharivorans sequence
  modified_base (2)..(3): a, c, t, g, unknown or other
  modified_base (32)..(32): a, c, t, g, unknown or other
  modified_base (94)..(94): a, c, t, g, unknown or other
  modified_base (189)..(189): a, c, t, g, unknown or other
  modified_base (341)..(341): a, c, t, g, unknown or other
  modified_base (345)..(347): a, c, t, g, unknown or other
cnnttaagttgatttcttcggattgattcttnctgactgagcgggggacgggtgagtaacgcgtgggtgacctgccccataccgggggataagnactggaaacggctgctaataccgcataagcgcacagagctgcctggctcggtgtgaaaaactccggtggtatgggatgggcccgcgtctgattangcatttggcggggtaacggcccaccaaaccgacgatcagtagccggcctgagagggcgagcgggcacattgggactgagacacggcccaaactcctacgggaggcatcagtggggaatattgcacgatgggggaaaccctgatgccgcgacncccnnnagaagaagtatttcggtatgtaaagctctatcagcagggaagataatgacggtacctgactaagaagccccggctaactacgtgccagcagccgcggtaatacgtagggggcaagcgttatccggatttactgggtgtaaagggagcgtagacggcaaggcaagtctgatgtgaaaacccagggcttaaccctgggactgcattggaaactgtctggctcgagtgccggagaggtaagcggaattcctagtgtagcggtgaaatgcgtagatattaggaagaacaccagtggcgaaggcggcttactggacggtaactgacgttgaggctcgaaagcgtggggagcaaacaggattagataccctggtagtccacgccgtaaacgatgaatgctaggtgttggggagcaaagctcttcggtgccgccgcaaacgcattaagcattccacctggggagtacgttcgcaagaatgaaactcaaaggaattgacggggacccgcacaagcggtggagcatgtggtttaattcgaagcaacgcgaagaaccttaccaggtcttgacatcccgatgaccggtccgtaacggggccttctcttcggagcattggagacaggtggtgcatggttgtcgtcagctcgtgtcgtgagatgttgggttaagtcccgcaacgagcgcaacccttatcctcagtagccagcaggtcaagctgggcactctgtggagactgccagggataacctggaggaaggtggggatgacgtcaaatcatcatgccccttatgatctgggctacacacgtgctacaatggcgtaaacaaagggaggcaaagccgcgaggtggagcaaatcccaaaaataacgtctcagttcggactgcagtctgcaactcgactgcacgaagctggaatcgctagtaatcgcgaatcagaatgtcgcggtgaatacgttcccgggtcttgtacacaccgcccgtcacaccatgggagttggtaacgcccgaagtcagtgacccaaccttcaggagggagc

SEQ ID NO: 49 - DNA, 1406 bp, Dialister succinatiphilus
cgggaggaaaagagaagcttgcttctttttgaatctagtggcaaacgggtgagtaacacgtaaacaacctgccttcaggatggggacaacagacggaaacgactgctaataccgaatgtgttccggagaccgcatgatttccggaagaaaggatggcctctatttataagctatcgcctgaagaggggtttgcgtctgattaggcagttggtgaggtaacggcccaccaaacctacgatcagtagccggtctgagaggatgaacggccacactggaactgagacacggtccagactcctacgggaggcagcagtggggaatcttccgcaatggacgaaagtctgacggagcaacgccgcgtgagtgatgacggccttcgggttgtaaagctctgtgatcggggacgaatggctggtatgctaataccatatcagagtgacggtacccgaatagcaagccacggctaactacgtgccagcagccgcggtaatacgtaggtggcaagcgttgtccggaattattgggcgtaaagcgcgcgcaggcggcttcttaagtcccatcttaaaagtgcggggcttaaccccgtgatgggatggaaactgggaggctggagtatcggagaggaaagtggaattcctagtgtagcggtgaaatgcgtagagattaggaagaacaccggtggcgaaggcgactttctggacgacaactgacgctgaggcgcgaaagcgtggggagcaaacaggattagataccctggtagtccacgccgtaaacgatgaatactaggtgtaggaggtatcgaccccttctgtgccggagctaacacaataagtattccgcctgggaagtacgatcgcaagattaaaactcaaaggaattgacgggggcccgcacaagcggtggagtatgtggtttaattcgacgcaacgcgaagaaccttaccaggtcttgacattgactgcaatcccgagaaatcgggagttcccttcggggacaggaaaacaggtggtgcacggctgtcgtcagctcgtgtcgtgagatgttgggttaagtcccgcaacgagcgcaacccctatcttatgttgccagcacgtaatggtgggaactcatgagagaccgccgcggacaacgcggaggaaggcggggatgacgtcaagtcatcatgccccttatgacctgggctacacacgtactacaatgggtgtcaacaaagagaagcaatggggcgacccggagcaaacctcaaaaacacacccccagttcagattgcaggctgcaacccgcctgcatgaagcaggaatcgctagtaatcgcgggtcagcataccgcggtgaatacgttcccgggccttgtacacaccgcccgtcacactatgagagtcagaaacacccgaagccggtgaggta

SEQ ID NO: 50 - DNA, 1337 bp, Bacteroides nordii
  modified_base (43)..(43): a, c, t, g, unknown or other
  modified_base (75)..(75): a, c, t, g, unknown or other
  modified_base (126)..(126): a, c, t, g, unknown or other
  modified_base (129)..(130): a, c, t, g, unknown or other
  modified_base (135)..(136): a, c, t, g, unknown or other
  modified_base (170)..(170): a, c, t, g, unknown or other
  modified_base (270)..(270): a, c, t, g, unknown or other
  modified_base (272)..(273): a, c, t, g, unknown or other
  modified_base (283)..(284): a, c, t, g, unknown or other
  modified_base (1006)..(1006): a, c, t, g, unknown or other
  modified_base (1008)..(1009): a, c, t, g, unknown or other
  modified_base (1333)..(1333): a, c, t, g, unknown or other
gtactgaaagagctttgacaatgttggtaggtaagcgtcgtcncttactcgactatttgaaagcaaaagatatcnaaagatatcgtgccattatcaaaactcttggattgcgtaagtaatccgctnggnngcgtnngattaagagaagtcgtttctctgagaacaagaancgacttcttttttttggtcctccctcgattgttgccctacccgaacttgaattaagcccttcgtacactataccatagacagcctttaaagaagtcgtancnnggaaaccctnnaccagccaagtagcgtgaaggatgactgccctatgggttgtaaacttcttttatatgggaataaagtgagccacgtgtggctttttgtatgtaccttatgaataaggatcggctaactccgtgccagcagccgcggtaatacggaggatccgagcgttatccggatttattgggtttaaagggagcgtaggtggacatgtaagtcagttgtgaaagtttgcggctcaaccgtaaaattgcagttgatactgtgtgtcttgagtacagtagaggtgggcggaattcgtggtgtagcggtgaaatgcttagatatcacgaagaactccgattgcgaaggcagctcactggactggtaactgacactgaggctcgaaagtgtgggtatcaaacaggattagataccctggtagtccacacagtaaacgatgaatactcgctgtttgcgatatacagcaagcggccaagcgaaagcattaagtattccacctggggagtacgccggcaacggtgaaactcaaaggaattgacgggggcccgcacaagcggaggaacatgtggtttaattcgatgatacgcgaggaaccttacccgggcttaaattgcatttgaataatttggaaacagattagccgcaaggcaaatgtgaaggtgctgcatggttgtcgtcagctcgtgccgtgaggtgtcggcttaagtgccataacgagcgcaacccttatctntnngagtttgatcatggctcagctgaggctcagatagctttgttttcataccgtatctcccatctgactgagcatatgaagctcaacagaaaagattatagtactgaaagagctttgacaatgttggtaggtaagcgtcgtcgcttactcgactatttgaaagcaaaagatatcgaaagatatcgtgccattatcaaaactcttggattgcgtaagtaatccgcttgttacaaacaagattaaaagaagtcgtttctctgagaagaagaagcgacttcttttttttagtcctccctcagttattgtcctacccgaactttcattaanccct

SEQ ID NO: 51 - DNA, 1395 bp, Dorea formicigenerans
  modified_base (1390)..(1390): a, c, t, g, unknown or other
tgcagtcgagcgaagcacttaagtttgattcttcggatgaagacttttgtgactgagcggcggacgggtgagtaacgcgtgggtaacctgcctcatacagggggataacagttagaaatggctgctaataccgcataagaccacagtactgcatggtacagtggtaaaaactccggtggtatgagatggacccgcgtctgattaggtagttggtgaggtaacggcccaccaagccgacgatcagtagccgacctgagagggtgaccggccacattgggactgagacacggcccagactcctacgggaggcagcagtggggaatattgcacaatgggcgaaagcctgatgcagcgacgccgcgtgaaggatgaagtatttcggtatgtaaacttctatcagcagggaagaaaatgacggtacctgactaagaagccccggctaactacgtgccagcagccgcggtaatacgtagggggcaagcgttatccggatttactgggtgtaaagggagcgtagacggctgtgcaagtctgaagtgaaaggcatgggctcaacctgtggactgctttggaaactgtgcagctagagtgtcggagaggtaagtggaattcctagtgtagcggtgaaatgcgtagatattaggaggaacaccagtggcgaaggcggcttactggacgatgactgacgttgaggctcgaaagcgtggggagcaaacaggattagataccctggtagtccacgccgtaaacgatgactgctaggtgtcgggtagcaaagctattcggtgccgcagctaacgcaataagcagtccacctggggagtacgttcgcaagaatgaaactcaaaggaattgacggggacccgcacaagcggtggagcatgtggtttaattcgaagcaacgcgaagaaccttacctgatcttgacatcccgatgaccgcttcgtaatggaagcttttcttcggaacatcggtgacaggtggtgcatggttgtcgtcagctcgtgtcgtgagatgttgggttaagtcccgcaacgagcgcaacccttatcttcagtagccagcattaaggatgggcactctggagagactgccagggataacctggaggaaggtggggatgacgtcaaatcatcatgccccttatgaccagggctacacacgtgctacaatggcgtaaacaaagggaagcagagccgcgaggccgagcaaatctcaaaaataacgtctcagttcggattgtagtctgcaactcgactacatgaagctggaatcgctagtaatcgcagatcagaatgctgcggtgaatacgttcccgggtcttgtacacaccgcccgtcacaccatgggagtcagtaacgcccgaagtcagtgacccaaccgaaagganggagc

SEQ ID NO: 52 - DNA, 1401 bp, Bacteroides xylanisolvens
  modified_base (2)..(3): a, c, t, g, unknown or other
  modified_base (1399)..(1400): a, c, t, g, unknown or other
anncatgcagtcgaggggcagcattttagtttgcttgcaaactaaagatggcgaccggcgcacgggtgagtaacacgtatccaacctgccgataactcggggatagcctttcgaaagaaagattaatatccgatagtatattaaaaccgcatggttttactattaaagaatttcggttatcgatggggatgcgttccattagtttgttggcggggtaacggcccaccaagactacgatggataggggttctgagaggaaggtcccccacattggaactgagacacggtccaaactcctacgggaggcagcagtgaggaatattggtcaatggacgagagtctgaaccagccaagtagcgtgaaggatgactgccctatgggttgtaaacttcttttatatgggaataaagtattccacgtgtggaattttgtatgtaccatatgaataaggatcggctaactccgtgccagcagccgcggtaatacggaggatccgagcgttatccggatttattgggtttaaagggagcgtaggtggattgttaagtcagttgtgaaagtttgcggctcaaccgtaaaattgcagttgaaactggcagtcttgagtacagtagaggtgggcggaattcgtggtgtagcggtgaaatgcttagatatcacgaagaactccgattgcgaaggcagctcactagactgcaactgacactgatgctcgaaagtgtgggtatcaaacaggattagataccctggtagtccacacagtaaacgatgaatactcgctgtttgcgatatacagtaagcggccaagcgaaagcattaagtattccacctggggagtacgccggcaacggtgaaactcaaaggaattgacgggggcccgcacaagcggaggaacatgtggtttaattcgatgatacgcgaggaaccttacccgggcttaaattgcatttgaatatagtggaaacattatagccgcaaggcaaatgtgaaggtgctgcatggttgtcgtcagctcgtgccgtgaggtgtcggcttaagtgccataacgagcgcaacccttatctttagttactaacaggttatgctgaggactctagagagactgccgtcgtaagatgtgaggaaggtggggatgacgtcaaatcagcacggcccttacgtccggggctacacacgtgttacaatggggggtacagaaggcagctacctggcgacaggatgctaatcccaaaaacctctctcagttcggatcgaagtctgcaacccgacttcgtgaagctggattcgctagtaatcgcgcatcagccatggcgcggtgaatacgttcccgggccttgtacacaccgcccgtcaagccatgaaagccgggggtacctgaagtacgtaaccgcaaggagcnnc

SEQ ID NO: 53 - DNA, 1397 bp, Lactobacillus rogosae
  modified_base (10)..(10): a, c, t, g, unknown or other
tgcagtcgancgaagcatttaagacggattctttcgggatgaagacttttatgactgagtggcggacgggtgagtaacgcgtgggtaacctgcctcacacagggggatagcagttggaaacggctgataataccgcataagcgcacagtaccgcatggtacagtgtgaaaaactccggtggtgtgagatggacccgcgtctgattagcttgttggcagggtaacggcctaccaaggcaacgatcagtagccgacctgagagggtgaccggccacattgggactgagacacggcccagactcctacgggaggcagcagtggggaatattgcacaatggaggaaactctgatgcagcgacgccgcgtgagtgaagaagtaattcgttatgtaaagctctatcagcagggaagatagtgacggtacctgactaagaagctccggctaaatacgtgccagcagccgcggtaatacgtatggagcaagcgttatccggatttactgggtgtaaagggagtgtaggtggcatcacaagtcagaagtgaaagcccggggctcaaccccgggactgcttttgaaactgtggagctggagtgcaggagaggcaagtggaattcctagtgtagcggtgaaatgcgtagatattaggaggaacaccagtggcgaaaggcggcttgctggactgtaactgacactgaggctcgaaagcgtggggagcaaacaggattagataccctggtagtccacgccgtaaacgatgaatactaggtgtcggggctcataagagcttcggtgccgcagcaaacgcaataagtattccacctggggagtacgttcgcaagaatgaaactcaaaggaattgacggggacccgcacaagcggtggagcatgtggtttaattcgaagcaacgcgaagaaccttaccaagtcttgacatcctcttgcccggtcagtaatgtgaccttttcttcggaacaagagtgacaggtggtgcatggttgtcgtcagctcgtgtcgtgagatgttgggttaagtcccgcaacgagcgcaacccctattcttagtagccagcatttaaggtgggcactctaggaagactgccagggataacctggaggaaggtggggatgacgtcaaatcatcatgccccttatgacttgggctacacacgtgctacaatggcgtaaacaaagtgaagcgagagtgtgagcttaagcaaatcacaaaaataacgtctcagttcggattgtagtctgcaactcgactacatgaagctggaatcgctagtaatcgcgaatcagaatgtcgcggtgaatacgttcccgggtcttgtacacaccgcccgtcacaccatgggagtcggaaatgcccgaagtcggtgacctaacgaaagaaggagc

SEQ ID NO: 54 - DNA, 1361 bp, Escherichia flexneri
  modified_base (2)..(2): a, c, t, g, unknown or other
gnaagaagcttgcttctttgctgacgagtggcggacgggtgagtaatgtctgggaaactgcctgatggagggggataactactggaaacggtagctaataccgcataacgtcgcaagaccaaagagggggaccttcgggcctcttgccatcggatgtgcccagatgggattagctagtaggtggggtaacggctcacctaggcgacgatccctagctggtctgagaggatgaccagccacactggaactgagacacggtccagactcctacgggaggcagcagtggggaatattgcacaatgggcgcaagcctgatgcagccatgccgcgtgtatgaagaaggccttcgggttgtaaagtactttcagcggggaggaagggagtaaagttaatacctttgctcattgacgttacccgcagaagaagcaccggctaactccgtgccagcagccgcggtaatacggagggtgcaagcgttaatcggaattactgggcgtaaagcgcacgcaggcggtttgttaagtcagatgtgaaatccccgggctcaacctgggaactgcatctgatactggcaagcttgagtctcgtagaggggggtagaattccaggtgtagcggtgaaatgcgtagagatctggaggaataccggtggcgaaggcggccccctggacgaagactgacgctcaggtgcgaaagcgtggggagcaaacaggattagataccctggtagtccacgccgtaaacgatgtcgacttggaggttgtgcccttgaggcgtggcttccggagctaacgcgttaagtcgaccgcctggggagtacggccgcaaggttaaaactcaaatgaattgacgggggcccgcacaagcggtggagcatgtggtttaattcgatgcaacgcgaagaaccttacctggtcttgacatccacggaagttttcagagatgagaatgtgccttcgggaaccgtgagacaggtgctgcatggctgtcgtcagctcgtgttgtgaaatgttgggttaagtcccgcaacgagcgcaacccttatcctttgttgccagcggtccggccgggaactcaaaggagactgccagtgataaactggaggaaggtggggatgacgtcaagtcatcatggcccttacgaccagggctacacacgtgctacaatggcgcatacaaagagaagcgacctcgcgagagcaagcggacctcataaagtgcgtcgtagtccggattggagtctgcaactcgactccatgaagtcggaatcgctagtaatcgtggatcagaatgccacggtgaatacgttcccgggccttgtacacaccgcccgtcacaccatgggagtgggttgcaaaagaag

SEQ ID NO: 55 - DNA, 1393 bp, Unknown
  Description of Unknown: Bacteroides kribbi / Bacteroides koreensis species cluster sequence
  modified_base (4)..(4): a, c, t, g, unknown or other
tgcngtcgaggggcagcattttagtttgcttgcaaactgaagatggcgaccggcgcacgggtgagtaacacgtatccaacctgccgataactccggaatagcctttcgaaagaaagattaataccggatggtatacgaatatcgcatgatatttttattaaagaatttcggttatcgatggggatgcgttccattagtttgttggcggggtaacggcccaccaagactacgatggataggggttctgagaggaaggtcccccacattggaactgagacacggtccaaactcctacgggaggcagcagtgaggaatattggtcaatgggcgagagcctgaaccagccaagtagcgtgaaggatgaaggctctatgggtcgtaaacttcttttatatgggaataaagttttccacgtgtggaattttgtatgtaccatatgaataaggatcggctaactccgtgccagcagccgcggtaatacggaggatccgagcgttatccggatttattgggtttaaagggagcgtaggtggattgttaagtcagttgtgaaagtttgcggctcaaccgtaaaattgcagttgaaactggcagtcttgagtacagtagaggtgggcggaattcgtggtgtagcggtgaaatgcttagatatcacgaagaactccgattgcgaaggcagctcactagactgttactgacactgatgctcgaaagtgtgggtatcaaacaggattagataccctggtagtccacacagtaaacgatgaatactcgctgtttgcgatatacagtaagcggccaagcgaaagcattaagtattccacctggggagtacgccggcaacggtgaaactcaaaggaattgacgggggcccgcacaagcggaggaacatgtggtttaattcgatgatacgcgaggaaccttacccgggcttaaattgcaacagaatatattggaaacagtatagccgtaaggctgttgtgaaggtgctgcatggttgtcgtcagctcgtgccgtgaggtgtcggcttaagtgccataacgagcgcaacccttatctttagttactaacaggttatgctgaggactctagagagactgccgtcgtaagatgtgaggaaggtggggatgacgtcaaatcagcacggcccttacgtccggggctacacacgtgttacaatggggggtacagaaggcggctacctggtgacaggatgctaatcccaaaaacctctctcagttcggatcgaagtctgcaacccgacttcgtgaagctggattcgctagtaatcgcgcatcagccatggcgcggtgaatacgttcccgggccttgtacacaccgcccgtcaagccatgaaagccgggggtacctgaagtacgtaaccgcaaggagc

SEQ ID NO: 56 - DNA, 1387 bp, Clostridium citroniae
  modified_base (2)..(2): a, c, t, g, unknown or other
  modified_base (11)..(12): a, c, t, g, unknown or other
  modified_base (23)..(24): a, c, t, g, unknown or other
  modified_base (1378)..(1378): a, c, t, g, unknown or other
  modified_base (1384)..(1384): a, c, t, g, unknown or other
cntgcagtcgnncgaagcaatcnnaatgaagttttcggatggatttctgattgactgagtggcggacgggtgagtaacgcgtggataacctgcctcacactgggggataacagttagaaatggctgctaataccgcataagcgcacagtaccgcatggtacggtgtgaaaaactccggtggtgtgagatggatccgcgtctgattagttagttggcggggtaacggcccaccaagacagcgatcagtagccgacctgagagggtgaccggccacattgggactgagacacggcccaaactcctacgggaggcagcagtggggaatattgcacaatgggcgaaagcctgatgcagcgacgccgcgtgagtgaagaagtatttcggtatgtaaagctctatcagcagggaagaaactgacggtacctgactaagaagccccggctaactacgtgccagcagccgcggtaatacgtagggggcaagcgttatccggatttactgggtgtaaagggagcgtagacgcgaagcaagtctggagtgaaaacccagggctcaaccctgggactgctttggaaactgttttgctagagtgtcggagaggtaagtggaattcctagtgtagcggtgaaatgcgtagatattaggaggaacaccagtggcgaaggcggcttactggacgataactgacgttgaggctcgaaagcgtggggagcaaacaggattagataccctggtagtccacgccgtaaacgatgaatgctaggtgttggggggcaaagcccttcggtgccgtcgcaaacgcaataagcattccacctgggggagtacgttcgcaagaatgaaactcaaaggaattgacggggacccgcacaagcggtggagcatgtggtttaattcgaagcaacgcgaagaaccttaccaagtcttgacatccccctgaccggtcagtaaagtgacctttccttcgggacaggggagacaggtggtgcatggttgtcgtcagctcgtgtcgtgagatgttgggttaagtcccgcaacgagcgcaacccttatccttagtagccagcaggtaaagctgggcactctagggagactgccagggataacctggaggaaggtggggatgacgtcaaatcatcatgccccttatgatttgggctacacacgtgctacaatggcgtaaacaaagggaagcgaccctgcgaaggcaagcaaatcccaaaaataacgtcccagttcggactgtagtctgcaacccgactacacgaagctggaatcgctagtaatcgcgaatcagaatgtcgcggtgaatacgttcccgggtcttgtacacaccgcccgtcacaccatgggagtcagcaacgcccgaagtcagtgncccaantcg

SEQ ID NO: 57 - DNA, 1399 bp, Dorea longicatena
  modified_base (21)..(22): a, c, t, g, unknown or other
  modified_base (1391)..(1393): a, c, t, g, unknown or other
tgcagtcgagcgaagcacttnngtttgattcttcggatgaagacttttgtgactgagcggcggacgggtgagtaacgcgtgggtaacctgcctcatacagggggataacagttagaaatgactgctaataccgcataagaccacggtaccgcatggtacagtggtaaaaactccggtggtatgagatggacccgcgtctgattaggtagttggtggggtaacggcctaccaagccgacgatcagtagccgacctgagagggtgaccggccacattgggactgagacacggcccagactcctacgggaggcagcagtggggaatattgcacaatggaggaaactctgatgcagcgacgccgcgtgaaggatgaagtatttcggtatgtaaacttctatcagcagggaagaaaatgacggtacctgactaagaagccccggctaactacgtgccagcagccgcggtaatacgtagggggcaagcgttatccggatttactgggtgtaaagggagcgtagacggcacggcaagccagatgtgaaagcccggggctcaaccccgggactgcatttggaactgctgagctagagtgtcggagaggcaagtggaattcctagtgtagcggtgaaatgcgtagatattaggaggaacaccagtggcgaaggcggcttgctggacgatgactgacgttgaggctcgaaagcgtggggagcaaacaggattagataccctggtagtccacgccgtaaacgatgactgctaggtgtcgggtggcaaagccattcggtgccgcagctaacgcaataagcagtccacctggggagtacgttcgcaagaatgaaactcaaaggaattgacggggacccgcacaagcggtggagcatgtggtttaattcgaagcaacgcgaagaaccttacctgatcttgacatcccgatgaccgcttcgtaatggaagctttttcttcggaacatcggtgacaggtggtgcatggttgtcgtcagctcgtgtcgtgagatgttgggttaagtcccgcaacgagcgcaacccctatcttcagtagccagcaggttaagctgggcactctggagagactgccagggataacctggaggaaggtggggatgacgtcaaatcatcatgccccttatgaccagggctacacacgtgctacaatggcgtaaacaaagagaagcgaactcgcgagggtaagcaaatctcaaaaataacgtctcagttcggattgtagtctgcaactcgactacatgaagctggaatcgctagtaatcgcagatcagaatgctgcggtgaatacgttcccgggtcttgtacacaccgcccgtcacaccatgggagtcagtaacgcccgaagtcagtgacccaaccgtaaggnnnagctgc

SEQ ID NO: 58 - DNA, 1401 bp, Eubacterium rectale
  modified_base (2)..(3): a, c, t, g, unknown or other
  modified_base (5)..(5): a, c, t, g, unknown or other
  modified_base (14)..(14): a, c, t, g, unknown or other
anncntgcagtcgnacgaagcactttatttgatttccttcgggactgattattttgtgactgagtggcggacgggtgagtaacgcgtgggtaacctgccttgtacagggggataacagttggaaacggctgctaataccgcataagcgcacagcatcgcatgatgcagtgtgaaaaactccggtggtataagatggacccgcgttggattagctagttggtgaggtaacggcccaccaaggcgacgatccatagccgacctgagagggtgaccggccacattgggactgagacacggcccaaactcctacgggaggcagcagtggggaatattgcacaatgggcgaaagcctgatgcagcgacgccgcgtgagcgaagaagtatttcggtatgtaaagctctatcagcagggaagataatgacggtacctgactaagaagcaccggctaaatacgtgccagcagccgcggtaatacgtatggtgcaagcgttatccggatttactgggtgtaaagggagcgcaggcggtgcggcaagtctgatgtgaaagcccggggctcaaccccggtactgcattggaaactgtcgtactagagtgtcggaggggtaagcggaattcctagtgtagcggtgaaatgcgtagatattaggaggaacaccagtggcgaaggcggcttactggacgataactgacgctgaggctcgaaagcgtggggagcaaacaggattagataccctggtagtccacgccgtaaacgatgaatactaggtgttgggaagcattgcttctcggtgccgtcgcaaacgcagtaagtattccacctggggagtacgttcgcaagaatgaaactcaaaggaattgacggggacccgcacaagcggtggagcatgtggtttaattcgaagcaacgcgaagaaccttaccaagtcttgacatccttctgaccggtacttaaccgtaccttctcttcggagcaggagtgacaggtggtgcatggttgtcgtcagctcgtgtcgtgagatgttgggttaagtcccgcaacgagcgcaacccttatctttagtagccagcggttaggccgggcactctagagagactgccagggataacctggaggaaggcggggatgacgtcaaatcatcatgccccttatgacttgggctacacacgtgctacaatggcgtaaacaaagggaagcaaagctgtgaagccgagcaaatctcaaaaataacgtctcagttcggactgtagtctgcaacccgactacacgaagctggaatcgctagtaatcgcagatcagaatgctgcggtgaatacgttcccgggtcttgtacacaccgcccgtcacaccatgggagttgggaatgcccgaagccagtgacctaaccgaaaggaaggag

SEQ ID NO: 59 - DNA, 1350 bp, Bacteroides stercorirosoris
  modified_base (2)..(2): a, c, t, g, unknown or other
  modified_base (292)..(292): a, c, t, g, unknown or other
  modified_base (294)..(297): a, c, t, g, unknown or other
  modified_base (1349)..(1349): a, c, t, g, unknown or other
gntggcgaccggcgcacgggtgagtaacacgtatccaacctgccgattattccgggatagcctttctaaagaaagattaatactggatagtataacgagaaggcatcttcttgttattaaagaatttcgataattgatggggatgcgttccattagtttgttggcggggtaacggcccaccaagacatcgatggataggggttctgagaggaaggtcccccacattggaactgagacacggaccaaactcatacgggaggcagcagtgaggaatattggtcaatggacgagngnnnnaaccagccaagtagcgtgaaggatgactgccctatgggttgtaaacttcttttatatgggaataaagtgcagtatgtatactgttttgtatgtaccatatgaataaggatcggctaactccgtgccagcagccgcggtaatacggaggatccgagcgttatccggatttattgggtttaaagggagcgtaggcggaagcttaagtcagttgtgaaagtttgcggctcaaccgtaaaattgcagttgatactgggtttcttgagtgcagtagaggtaggcggaattcgtggtgtagcggtgaaatgcttagatatcacgaagaactccgattgcgaaggcagcttactggactgtaactgacgctgatgctcgaaagtgtgggtatcaaacaggattagataccctggtagtccacacagtaaacgatgaatactcgctgtttgcgatatacagcaagcggccaagcgaaagcattaagtattccacctggggagtacgccggcaacggtgaaactcaaaggaattgacgggggcccgcacaagcggaggaacatgtggtttaattcgatgatacgcgaggaaccttacccgggcttaaattgcaactgacgtaggtggaaacatctattccttcgggcagttgtgaaggtgctgcatggttgtcgtcagctcgtgccgtgaggtgtcggcttaagtgccataacgagcgcaacccttatctttagttactaacaggttatgctgaggactctagagagactgccgtcgtaagatgtgaggaaggtggggatgacgtcaaatcagcacggcccttacgtccggggctacacacgtgttacaatggggggtacagaaggcagctacacggcgacgtgatgctaatccccaaaacctctctcagttcggattggagtctgcaacccgactccatgaagctggattcgctagtaatcgcgcatcagccacggcgcggtgaatacgttcccgggccttgtacacaccgcccgtcaagccatgaaagccgggggtacctgaagtccgtaaccgtaagna

SEQ ID NO: 60 - DNA, 1384 bp, Bifidobacterium longum
tgcagtcgaacgggatccatcaggctttgcttggtggtgagagtggcgaacgggtgagtaatgcgtgaccgacctgccccatacaccggaatagctcctggaaacgggtggtaatgccggatgctccagttgatcgcatggtcttctgggaaagctttcgcggtatgggatggggtcgcgtcctatcagcttgacggcggggtaacggcccaccgtggcttcgacgggtagccggcctgagagggcgaccggccacattgggactgagatacggcccagactcctacgggaggcagcagtggggaatattgcacaatgggcgcaagcctgatgcagcgacgccgcgtgagggatggaggccttcgggttgtaaacctcttttatcggggagcaagcgagagtgagtttacccgttgaataagcaccggctaactacgtgccagcagccgcggtaatacgtagggtgcaagcgttatccggaattattgggcgtaaagggctcgtaggcggttcgtcgcgtccggtgtgaaagtccatcgcttaacggtggatccgcgccgggtacgggcgggcttgagtgcggtaggggagactggaattcccggtgtaacggtggaatgtgtagatatcgggaagaacaccaatggcgaaggcaggtctctgggccgttactgacgctgaggagcgaaagcgtggggagcgaacaggattagataccctggtagtccacgccgtaaacggtggatgctggatgtggggcccgttccacgggttccgtgtcggagctaacgcgttaagcatcccgcctggggagtacggccgcaaggctaaaactcaaagaaattgacgggggcccgcacaagcggcggagcatgcggattaattcgatgcaacgcgaagaaccttacctgggcttgacatgttcccgacggtcgtagagatacggcttcccttcggggcgggttcacaggtggtgcatggtcgtcgtcagctcgtgtcgtgagatgttgggttaagtcccgcaacgagcgcaaccctcgccccgtgttgccagcggattatgccgggaactcacgggggaccgccggggttaactcggaggaaggtggggatgacgtcagatcatcatgccccttacgtccagggcttcacgcatgctacaatggccggtacaacgggatgcgacgcggcgacgcggagcggatccctgaaaaccggtctcagttcggatcgcagtctgcaactcgactgcgtgaaggcggagtcgctagtaatcgcgaatcagcaacgtcgcggtgaatgcgttcccgggccttgtacacaccgcccgtcaagtcatgaaagtgggcagcacccgaagccggtggcctaaccccttgtggga

SEQ ID NO: 61 - DNA, 1361 bp, Alistipes shahii
  modified_base (5)..(5): a, c, t, g, unknown or other
  modified_base (9)..(9): a, c, t, g, unknown or other
  modified_base (252)..(252): a, c, t, g, unknown or other
  modified_base (259)..(260): a, c, t, g, unknown or other
  modified_base (1360)..(1360): a, c, t, g, unknown or other
agcantgcngggtggcgaccggcgcacgggtgcgtaacgcgtatgcaacctacccataacagggggataacactgagaaattggtactaataccccataacatcagaaccggcatcggttttggttgagaactccggtggttatggatgggcatgcgttgtattagctggttggtgaggtaacggctcaccaaggcaacgatacatagggggactgagaggttaaccccccacattggtactgagacacganccaactnnctacgggaggcagcagtgaggaatattggtcaatggacgcaagtctgaaccagccatgccgcgtgcaggaagacggctctatgagttgtaaactgcttttgtacgagggtaaacgcttctacgtgtaggagcctgaaagtatcgtacgaataaggatcggctaactccgtgccagcagccgcggtaatacggaggatccaagcgttatccggatttattgggtttaaagggtgcgtaggcggtttgataagttagaggtgaaataccggtgcttaacaccggaactgcctctaatactgttgaactagagagtagttgcggtaggcggaatgtatggtgtagcggtgaaatgcttagagatcatacagaacaccgattgcgaaggcagcttaccaaactatatctgacgttgaggcacgaaagcgtggggagcaaacaggattagataccctggtagtccacgcagtaaacgatgataactcgctgtcggcgatacacagtcggcggctaagcgaaagcgataagttatccacctggggagtacgttcgcaagaatgaaactcaaaggaattgacgggggcccgcacaagcggaggaacatgtggtttaattcgatgatacgcgaggaaccttacccgggcttgaaagttactgacgattctggaaacaggatttcccttcggggcaggaaactaggtgctgcatggttgtcgtcagctcgtgccgtgaggtgtcgggttaagtcccataacgagcgcaacccctaccgttagttgccatcaggtcaagctgggcactctggcgggactgccggtgtaagccgagaggaaggtggggatgacgtcaaatcagcacggcccttacgtccggggctacacacgtgttacaatggtaggtacagagggcagctacccagtgatgggatgcgaatctcgaaagcctatctcagttcggatcggaggctgaaacccgcctccgtgaagttggattcgctagtaatcgcgcatcagccatggcgcggtgaatacgttcccgggccttgtacacaccgcccgtcaagccatggaagctgggggtgcctgaagttcgtgaccgcaagna

SEQ ID NO: 62 - DNA, 1356 bp, Collinsella aerofaciens
  modified_base (1339)..(1339): a, c, t, g, unknown or other
  modified_base (1350)..(1352): a, c, t, g, unknown or other
cggcacctatcttcggatggaagcgagtggcgaacggctgagtaacacgtggagaacctgccccctcccccgggatagccgcccgaaaggacgggtaataccggataccccggggtgccgcatggcaccccggctaaagccccgacgggaggggatggctccgcggcccatcaggtagacggcggggtgacggcccaccgtgccgacaacgggtagccgggttgagagaccgaccggccagattgggactgagacacggcccagactcctacgggaggcagcagtggggaatcttgcgcaatggggggaaccctgacgcagcgacgccgcgtgcgggacggaggccttcgggtcgtaaaccgctttcagcagggaagagtcaagactgtacctgcagaagaagccccggctaactacgtgccagcagccgcggtaatacgtagggggcgagcgttatccggattcattgggcgtaaagcgcgcgtaggcggcccggcaggccgggggtcgaagcggggggctcaaccccccgaagcccccggaacctccgcggcttgggtccggtaggggagggtggaacacccggtgtagcggtggaatgcgcagatatcgggtggaacaccggtggcgaaggcggccctctgggccgagaccgacgctgaggcgcgaaagctgggggagcgaacaggattagataccctggtagtcccagccgtaaacgatggacgctaggtgtggggggacgatccccccgtgccgcagccaacgcattaagcgtcccgcctggggagtacggccgcaaggctaaaactcaaaggaattgacgggggcccgcacaagcagcggagcatgtggcttaattcgaagcaacgcgaagaaccttaccagggcttgacatatgggtgaagcgggggagaccccgtggccgagaggagcccatacaggtggtggcatggctgtcgtcagctcgtgtcgtgagatgttgggttaagtcccgcaacgagcgcaacccccgccgcgtgttgccatcgggtgatgccgggaacccacgcgggaccgccgccgtcaaggcggaggagggcggggacgacgtcaagtcatcatgccccttatgccctgggctgcacacgtgctacaatggccggtacagagggatgccaccccgcgagggggagcggatcccggaaagccggccccagttcggattgggggctgcaacccgcccccatgaagtcggagttgctagtaatcgcggatcagcatgccgcggtgaatgcgttcccgggccttgtacacaccgcccgtcacaccacccgagtcgtctgcacccgaagtcgcncggcccaaccnnnaggg

SEQ ID NO: 63 - DNA, 1387 bp, Lachnospira sp.
  modified_base (10)..(10): a, c, t, g, unknown or other
  modified_base (1383)..(1384): a, c, t, g, unknown or other
tgcagtcgancgaagcatttaaaacggattttttcggaatgaagttttttatgactgagtggcggacgggtgagtaacgcgtgggtaacctgcctcacacagggggatagcagttggaaacgactggtaataccgcataagcgcacagcttcgcatgaagcggtgtgaaaaactccggtggtgtgagatggacccgcgtctgattaggtagttggtgaggtaacggcccaccaagccgacgatcagtagccgacctgagagggtgaccggccacattgggactgagacacggcccagactcctacgggaggcagcagtggggaatattgcacaatggaggaaactctgatgcagcgacgccgcgtgagtgaagaagtatttcggtatgtaaagctctatcagcagggaagacagtgacggtacctgactaagaagctccggctaaatacgtgccagcagccgcggtaatacgtatggagcaagcgttatccggatttactgggtgtaaagggagtgtaggtggtatcacaagtcagaagtgaaagcccggggctcaaccccgggactgcttttgaaactgtggaactggagtgcaggagaggtaagtggaattcctagtgtagcggtgaaatgcgtagatattaggaggaacaccagtggcgaaggcggcttactggactgtaactgacactgaggctcgaaagcgtggggagcaaacaggattagataccctggtagtccacgccgtaaacgatgaatactaggtgtcggggctcataagagcttcggtgccgcagcaaacgcaataagtattccacctggggagtacgttcgcaagaatgaaactcaaaggaattgacggggacccgcacaagcggtggagcatgtggtttaattcgaagcaacgcgaagaaccttaccaagtcttgacatccttctgaccggacagtaatgtgtcctttccttcgggacagaagagacaggtggtgcatggttgtcgtcagctcgtgtcgtgagatgttgggttaagtcccgcaacgagcgcaacccctatcctcagtagccagcaggtaaagctgggcactctgtggagactgccagggataacctggaggaaggtggggatgacgtcaaatcatcatgccccttatgacttgggctacacacgtgctacaatggcgtaaacaaagtgaagcgagagtgtgagcttaagcaaatcacaaaaataacgtctcagttcggattgtagtctgcaactcgactacatgaagctggaatcgctagtaatcgcgaatcagaatgtcgcggtgaatacgttcccgggtcttgtacacaccgcccgtcacaccatgggagtcggaaatgcccgaagtcggtgacctnncgt

SEQ ID NO: 64 - DNA, 1398 bp, Dorea sp.
  modified_base (1388)..(1388): a, c, t, g, unknown or other
tgcagtcgagcgaagcacctaagaaagattcttcggatgaattcttttgtgactgagcggcggacgggtgagtaacgcgtgggtaacctgcctcatacagggggataacagttagaaatgactgctaataccgcataagaccacggtaccgcatggtacagtggtaaaaactccggtggtatgagatggacccgcgtctgattagctggttggtggggtaacggcctaccaaggcgacgatcagtagccgacctgagagggtgaccggccacattgggactgagacacggcccaaactcctacgggaggcagcagtggggaatattgcacaatgggggaaaccctgatgcagcgacgccgcgtgaaggatgaagtatttcggtatgtaaacttctatcagcagggaagaaaatgacggtacctgactaagaagccccggctaactacgtgccagcagccgcggtaatacgtagggggcaagcgttatccggatttactgggtgtaaagggagcgtagacggcattgcaagccagatgtgaaagcccggggctcaaccccgggactgcatttggaactgtagagctagagtgtcggagaggcaagtggaattcctagtgtagcggtgaaatgcgtagatattaggaggaacaccagtggcgaaggcggcttgctggacgatgactgacgttgaggctcgaaagcgtggggagcaaacaggattagataccctggtagtccacgccgtaaacgatgactactaggtgtcgggtagcaaagctattcggtgccgcagcaaacgcaataagtagtccacctggggagtacgttcgcaagaatgaaactcaaaggaattgacggggacccgcacaagcggtggagcatgtggtttaattcgaagcaacgcgaagaaccttacctgatcttgacatcctgatgaccgctccgtaatgggagtttttcttcggaacatcagagacaggtggtgcatggttgtcgtcagctcgtgtcgtgagatgttgggttaagtcccgcaacgagcgcaacccctatcttcagtagccagcattcaggatgggcactctggagagactgccagggataacctggaggaaggtggggatgacgtcaaatcatcatgccccttatgaccagggctacacacgtgctacaatggcgtaaacaaagggaagcgagaccgcgaggtggagcaaatcccaaaaataacgtctcagttcggattgtagtctgcaactcgactacatgaagctggaatcgctagtaatcgcgaatcagaatgtcgcggtgaatacgttcccgggtcttgtacacaccgcccgtcacaccatgggagtcagtaacgcccgaagtcagtgacctaaccgtaagnaaggagctgc

SEQ ID NO: 65 - DNA, 1387 bp, Unknown
  Description of Unknown: Sutterellaceae sp. FBI00065 sequence
  modified_base (14)..(14): a, c, t, g, unknown or other
tgcagtcgaacggnagcgggtataaagcttgctttatatgccgacgagtggcgaacgggtgagtaatgcatcggaacgtgtccaattgtgggggacaaccagtcgaaaggctggctaataccgcataagatctaaggatgaaagcaggggatcgcaagaccttgcgcagttggagcggccgatgtctgattagctagttggtgaggtaaaggctcaccaaggcaacgatcagtagctggtctgagaggacgatcagccacactgggactgagacacggcccagactcctacgggaggcagcagtggggaattttggacaatgggcgcaagcctgatccagctattccgcgtgcgggatgaaggccctcgggttgtaaaccgcttttgtagaggaagaaaaggcttcaattaagacgtgaagctgatgacggtactctaagaataagcaccggctaactacgtgccagcagccgcggtaatacgtagggtgcaagcgttaatcggaattactgggcgtaaagggtgtgcaggcggttaaataagacggatgtgaaatccccgggcttaacctgggaatgccatccgtgactgtttgactagagtgcgtcagagggaggtggaattccaagtgtagcagtgaaatgcgtagatatttggaagaacaccgatggcgaaggcagcctcctgggacgtaactgacgctcatacacgaaagcgtggggagcaaacaggattagataccctggtagtccacgccctaaacgatgtcaactggttgttggagggtaaaatcttcagtaacgaagccaacgcgtgaagttgaccgcctgggaagtacggtcgcaagactaaaactcaaaggaattgacggggacccgcacaagcggtgggatgatgtggattaattcgatgcaacgcgaaaaaccttacctacccttgacatgccgttaaagccgctgtaatggcggtgtactcgcaagagagaacggacacaggtgctgcatggctgtcgtcagctcgtgtcgtgagatgttgggttaagtcccgcaacgagcgcaacccttgtcatcagttgctacgaaagggcactctgatgagactgccggtgacaaaccggaggaaggtggggatgacgtcaagtcctcatggcccttatgggtagggcttcacacgtcatacaatggtcggaacagagggtcgcaaagccgcgaggcgaagccaatcccagaaaaccgatcgtagtccggattgcagtctgcaactcgactgcatgaagtcggaatcgctagtaatcgcggatcagcatgtcgcggtgaatacgttcccgggtcttgtacacaccgcccgtcaaacaatgggagtgggggttaccagaagtcgttagcct

SEQ ID NO: 66 - DNA, 1394 bp, Parasutterella excrementihominis
  modified_base (3)..(4): a, c, t, g, unknown or other
  modified_base (6)..(7): a, c, t, g, unknown or other
  modified_base (19)..(19): a, c, t, g, unknown or other
  modified_base (1387)..(1389): a, c, t, g, unknown or other
  modified_base (1391)..(1392): a, c, t, g, unknown or other
ctnncnntgcagtcgtacnggtaaccaagagaagcttgcttctctccggcgacgagtggcgaacgggtgagtaatacatcggaacgtgtccgctcgtgggggacaaccagccgaaaggttggctaataccgcatgagttctacggaagaaagagggggacccgcaagggcctctcgcgagcggagcggccgatgactgattagccggttggtgaggtaacggctcaccaaagcaacgatcagtagctggtctgagaggacgaccagccacactgggactgagacacggcccagactcctacgggaggcagcagtggggaattttggacaatgggcgcaagcctgatccagctattccgcgtgtgggatgaaggccctcgggttgtaaaccacttttgtagagaacgaaaagacaccttttaaaaaagggtgttgctgacggtactctaagaataagcaccggctaactacgtgccagcagccgcggtaatacgtagggtgcgagcgttaatcggaattactgggcgtaaagggtgcgcaggcggttgagtaagacagatgtgaaatccccgagcttaactcgggaatggcatatgtgactgctcgactagagtgtgtcagagggaggtggaattccacgtgtagcagtgaaatgcgtagatatgtggaagaacaccgatggcgaaggcagcctcctgggacataactgacgctcaggcacgaaagcgtggggagcaaacaggattagataccctggtagtccacgccctaaacgatgttaactagttgttgggaagtaaaattctcagtaacgcagccaacgcgagaagttaaccgcctgggaagtacggtcgcaagactaaaactcaaaggaattgacggggacccgcacaagcggtggatgatgtggattaattcgatgcaacgcgaaaaaccttacctacccttgacatgtcaggaagctcttgtaatgagagcgtgcccgcaagggagcctgaacacaggtgctgcatggctgtcgtcagctcgtgtcgtgagatgttgggttaagtcccgcaacgagcgcaacccttgtcactagttgctacgaaagggcactctagtgagactgccggtgacaaaccggaggaaggtggggatgacgtcaagtcctcatggcccttatgggtagggcttcacacgtcatacaatggtcggaacagagggcagcgaagtcgtgagacggagccaatcccagaaaaccgatcgtagtccggattgcagtctgcaactcgactgcatgaagtcggaatcgctagtaatcgcggatcagcatgccgcggtgaatacgttcccgggtcttgtacacaccgcccgtcaaacaatgggagtggtgtttaccagaagtnnntnnga

SEQ ID NO: 67 - DNA, 1375 bp, Oxalobacter formigenes
  modified_base (1357)..(1357): a, c, t, g, unknown or other
  modified_base (1372)..(1372): a, c, t, g, unknown or other
tcgaacggcagcatgggggcaaccctgatggcgagtggcgaacgggtgagtaatatatcggaacgtacccaagagtgggggacaaccagtcgaaagattggctaataccgcatacgatctaaggatgaaagtgggggaccttcgggcctcacgctcctggagcggccgatagctgattagctagttggtggggtaaaggcctaccaaggcgatgatcagtagctggtctgagaggacgatcagccacactgggactgagacacggcccagactcctacgggaggcagcagtggggaattttggacaatgggggaaaccctgatccagcaatgccgcgtgagtgaagaaggccttcgggttgtaaagctcttttgtcagggaagaaattgattgggctaatatcccgattagatgacggtacctgaagaataagcaccggctaactacgtgccagcagccgcggtaatacgtagggtgcgagcgttaattcggaattactgggcgtaaagcgtgcgcaggcggttgtgtaagacagatgtgaaatgcccgggctcaacctgggaattgcatttgtgactgcacggctagagtgtgtcagaggggggtagaattccacgtgtagcagtgaaatgcgtagatatgtggaggaataccgatggcgaaggcagccccctgggataacactgacgctcatgcacgaaagcgtggggagcaaacaggattagataccctggtagtccacgccctaaacgatgtcgactagttgttgggtcttaattgacttagtaacgcagctaacgcgtgaagtcgaccgcctggggagtacggtcgcaagattaaaactcaaaggaattgacggggacccgcacaagcggtggatgatgtggattaattcgatgcaacgcgaaaaaccttacctacccttgacatgtcaggaatcccgaagagatttgggagtgctcgaaagagagcctgaacacaggtgctgcatggctgtcgtcagctcgtgtcgtgagatgttgggttaagtcccgcaacgagcgcaacccttgtcattagttgctacgaaagggcactctaatgaaactgccggtgacaaaccggaggaaggtggggatgacgtcaagtcctcatggcccttatgggtagggcttcacacgtcatacaatggtgcatacagagggttgccaacccgagagggggagctaatctcagaaagtgcatcgtagtccggattgaagtctgcaactcgacttcatgaagttggaatcgctagtaatcgcggatcagcatgtcgcggtgaatacgttcccgggtcttgtacccaccccccgtcacaccatgggagcgggttttnccagaagtaggtagntta

SEQ ID NO: 68 - DNA, 1380 bp, Akkermansia muciniphila
  modified_base (5)..(5): a, c, t, g, unknown or other
  modified_base (619)..(619): a, c, t, g, unknown or other
  modified_base (1347)..(1347): a, c, t, g, unknown or other
  modified_base (1354)..(1357): a, c, t, g, unknown or other
  modified_base (1377)..(1379): a, c, t, g, unknown or other
tgcangtcgaacgagagaattgctagcttgctaataattctctagtggcgcacgggtgagtaacacgtgagtaacctgcccccgagagcgggatagccctgggaaactgggattaataccgcatagtatcgaaagattaaagcagcaatgcgcttggggatgggctcgcggcctattagttagttggtgaggtaacggctcaccaaggcgatgacgggtagccggtctgagaggatgtccggccacactggaactgagacacggtccagacacctacgggtggcagcagtcgagaatcattcacaatgggggaaaccctgatggtgcgacgccgcgtgggggaatgaaggtcttcggattgtaaacccctgtcatgtgggagcaaattaaaaagatagtaccacaagaggaagagacggctaactctgtgccagcagccgcggtaatacagaggtctcaagcgttgttcggaatcactgggcgtaaagcgtgcgtaggctgtttcgtaagtcgtgtgtgaaaggcgcgggctcaacccgcggacggcacatgatactgcgagactagagtaatggagggggaaccggaattctcggtgtagcagtgaaatgcgtagatntcgagaggaacactcgtggcgaaggcgggttcctggacattaactgacgctgaggcacgaaggccaggggagcgaaagggattagatacccctgtagtcctggcagtaaacggtgcacgcttggtgtgcggggaatcgaccccctgcgtgccggagctaacgcgttaagcgtgccgcctggggagtacggtcgcaagattaaaactcaaagaaattgacggggacccgcacaagcggtggagtatgtggcttaattcgatgcaacgcgaagaaccttacctgggcttgacatgtaatgaacaacatgtgaaagcatgcgactcttcggaggcgttacacaggtgctgcatggccgtcgtcagctcgtgtcgtgagatgtttggttaagtccagcaacgagcgcaacccctgttgccagttaccagcacgtgaaggtggggactctggcgagactgcccagatcaactgggaggaaggtggggacgacgtcaggtcagtatggcccttatgcccagggctgcacacgtactacaatgcccagtacagagggggccgaagccgcgaggcggaggaaatcctgaaaactgggcccagttcggactgtaggctgcaacccgcctacacgaagccggaatcgctagtaatggcgcatcagctacggcgccgtgaatacgttcccgggtcttgtacacaccgcccgtcacatcatggaagccggtcgcacccgnaagtatnnnnagccaaccgcaaggaggcannnc

SEQ ID NO: 69 - DNA, 1394 bp, Ruminococcus bromii
  modified_base (4)..(4): a, c, t, g, unknown or other
tgcngtcgaacggaactgttttgaaagatttcttcggaatgaatttgatttagtttagtggcggacgggtgagtaacgcgtgagtaacctgccttcaagagggggataacattctgaaaagaatgctaataccgcatgacatatcggaaccacatggttttgatatcaaagattttatcgcttgaagatggactcgcgtccgattagttagttggtgaggtaacggctcaccaagaccgcgatcggtagccggactgagaggttgaacggccacattgggactgagacacggcccagactcctacgggaggcagcagtgggggatattgcgcaatgggggcaaccctgacgcagcaacgccgcgtgaaggatgaaggttttcggattgtaaacttcttttattaaggacgaaaattgacggtacttaatgaataagctccggctaactacgtgccagcagccgcggtaatacgtagggagcaagcgttgtccggatttactgggtgtaaagggtgcgtaggcggctttgcaagtcagatgtgaaatctatgggctcaacccataaactgcatttgaaactgtagagcttgagtgaagtagaggcaggcggaattccccgtgtagcggtgaaatgcgtagagatggggaggaacaccagtggcgaaggcggcctgctgggctttaactgacgctgaggcacgaaagcgtgggtagcaaacaggattagataccctggtagtccacgctgtaaacgatgattactaggtgtggggggtctgaccccttccgtgccggagttaacacaataagtaatccacctggggagtacggccgcaaggttgaaactcaaaggaattgacgggggcccgcacaagcagtggagtatgtggtttaattcgaagcaacgcgaagaaccttaccaggtcttgacatccaactaacgaagtagagatacattaggtgcccttcggggaaagttgagacaggtggtgcatggttgtcgtcagctcgtgtcgtgagatgttgggttaagtcccgcaacgagcgcaacccttgctattagttgctacgcaagagcactctaataggactgccgttgacaaaacggaggaaggtggggacgacgtcaaatcatcatgccccttatgacctgggctacacacgtactacaatggatgttaacagagggaagcaagacagcgatgtggagcaaacccctaaaaacattctcagttcagattgcaggctgcaacccgcctgcatgaagatggaattgctagtaatcgcggatcagcatgccgcggtgaatacgttcccgggccttgtacacaccgcccgtcacaccatgggagccggtaatacccgaagtcagtagtccaacctcgtgaggacgc

SEQ ID NO: 70 - DNA, 1392 bp, Unknown
  Description of Unknown: Bacteroides kribbi / Bacteroides koreensis species cluster sequence
tgcagtcgaggggcagcattttagtttgcttgcaaactgaagatggcgaccggcgcacgggtgagtaacacgtatccaacctgccgataactccggaatagcctttcgaaagaaagattaataccggatggtatacgaatatcgcatgatatttttattaaagaatttcggttatcgatggggatgcgttccattagtttgttggcggggtaacggcccaccaagactacgatggataggggttctgagaggaaggtcccccacattggaactgagacacggtccaaactcctacgggaggcagcagtgaggaatattggtcaatgggcgagagcctgaaccagccaagtagcgtgaaggatgaaggctctatgggtcgtaaacttcttttatatgggaataaagttttccacgtgtggaattttgtatgtaccatatgaataaggatcggctaactccgtgccagcagccgcggtaatacggaggatccgagcgttatccggatttattgggtttaaagggagcgtaggtggattgttaagtcagttgtgaaagtttgcggctcaaccgtaaaattgcagttgaaactggcagtcttgagtacagtagaggtgggcggaattcgtggtgtagcggtgaaatgcttagatatcacgaagaactccgattgcgaaggcagctcactagactgttactgacactgatgctcgaaagtgtgggtatcaaacaggattagataccctggtagtccacacagtaaacgatgaatactcgctgtttgcgatatacagtaagcggccaagcgaaagcattaagtattccacctggggagtacgccggcaacggtgaaactcaaaggaattgacgggggcccgcacaagcggaggaacatgtggtttaattcgatgatacgcgaggaaccttacccgggcttaaattgcaacagaatatattggaaacagtatagccgtaaggctgttgtgaaggtgctgcatggttgtcgtcagctcgtgccgtgaggtgtcggcttaagtgccataacgagcgcaacccttatctttagttactaacaggtatgctgaggactctagagagactgccgtcgtaagatgtgaggaaggtggggatgacgtcaaatcagcacggcccttacgtccggggctacacacgtgttacaatggggggtacagaaggcggctacctggtgacaggatgctaatcccaaaaacctctctcagttcggatcgaagtctgcaacccgacttcgtgaagctggattcgctagtaatcgcgcatcagccatggcgcggtgaatacgttcccgggccttgtacacaccgcccgtcaagccatgaaagccgggggtacctgaagtacgtaaccgcaaggagc

SEQ ID NO: 71 - DNA, 1394 bp, Unknown
  Description of Unknown: Lachnospiraceae sp. FBI00071 sequence
  modified_base (9)..(10): a, c, t, g, unknown or other
  modified_base (1385)..(1385): a, c, t, g, unknown or other
tgcagtcgnncgaagcactttattacaatttcttcggaatgacgatttagtgactgagtggcggacgggtgagtaacgcgtgggtaacctgccttatacagggggataacagttagaaatgactgctaataccgcataagcgcacaggattgcatgatctggtgtgaaaaactccggtggtataagatggacccgcgtctgattagctggttggtgaggtaacggcccaccaaggcgacgatcagtagccgacctgagagggtgaccggccacattgggactgagacacggcccaaactcctacgggaggcagcagtggggaatattgcacaatgggggaaaccctgatgcagcgacgccgcgtgagcgaagaagtatttcggtatgtaaagctctatcagcagggaagaaaaaaatgacggtacctgactaagaagccccggctaactacgtgccagcagcccggtaatacgtagggggcaagcgttatccggatttactgggtgtaaagggagcgcaggcggtgcggcaagtctgatgtgaaagcccggggctcaaccccgggactgcattggaaactgtcgtacttgagtatcggagaggtaagtggaattcctagtgtagcggtgaaatgcgtagatattaggaggaacaccagtggcgaaggcggcttactggacgataactgacgctgaggctcgaaagcgtggggagcaaacaggattagataccctggtagtccacgccgtaaacgatgaatactaggtgtcgggggacatagtccttcggtgccgcagcaaacgcaataagtattccacctgggggagtacgttcgcaagaatgaaactcaaaggaattgacggggacccgcacaagcggtggagcatgtggtttaattcgaagcaacgcgaagaaccttaccaagtcttgacatcccggtgacaaagtatgtaatgtactctttcttcggaacaccggtgacaggtggtgcatggttgtcgtcagctcgtgtcgtgagatgttgggttaagtcccgcaacgagcgcaacccctgttcttagtagccagcggttcggccgggcactctagggagactgccagggataacctggaggaaggcggggatgacgtcaaatcatcatgccccttatgacttgggctacacacgtgctacaatggcgtaaacaaagggaagcgaaaaggtgacttctagcaaatcccaaaaataacgtcccagttcggactgtagtctgcaactcgactacacgaagctggaatcgctagtaatcgcgaatcagaatgtcgcggtgaatacgttcccgggtcttgtacacaccgcccgtcacaccatgggagtcgggaatgcccgaagccggtgactcaancgaaaggag

SEQ ID NO: 72 - DNA, 1373 bp, Coprococcus eutactus
  modified_base (3)..(5): a, c, t, g, unknown or other
  modified_base (583)..(583): a, c, t, g, unknown or other
  modified_base (679)..(679): a, c, t, g, unknown or other
  modified_base (1244)..(1244): a, c, t, g, unknown or other
tcnnncgagagaagattggtgcttgcactgatccgatcgagtggcggacgggtgagtaacgcgtgggtaacctgcctcatacaggggaataacagttggaaacggctgctaaaaccgcataagcgcacggtatcgcatgatacagtgtgaaaaactccggtggtatgagatggacccgcgtctgattagctagttggtgaggtaacggcccaccaaggcaacgatcagtagccggcctgagagggtgaacggccacattgggactgagacacggcccaaactcctacgggaggcagcagtggggaatattgcacaatgggggaaaccctgatgcagcgacgccgcgtgagtgatgaagtatttcggtatgtaaagctctatcagcagggaagataatgacggtacctgactaagaagcaccggctaaatacgtgccagcagccgcggtaatacgtatggtgcaagcgttatccggatttactgggtgtaaagggtgcgtaggtggtgagacaagtctgaagtgaaaatccggggcttaaccccggaactgctttggaaactgcctgactagagtacaggaganggaagtggaattcctagtgtagcggtgaaatgcgtagatattaggaggaacaccagtggcgaaggcgacttactggactgctactgacactgaggncacgaaaagcgtggggagcaaacaggattagataccctggtagtccacgccgtaaacgatgaatactaggtgtcggggcccaaagggcttcggtgccgcagccaacgcaataagtattccacctggggagtacgttcgcaagaatgaaactcaaaggaattgacggggacccgcacaagcggtggagcatgtggtttaattcgaagcaacgcgaagaaccttaccaagtcttgacatcctgctgaccgttccttaaccggaactttccttcgggacagcagagacaggtggtgcatggttgtcgtcagctcgtgtcgtgagatgttgggttaagtcccgcaacgagcgcaacccctatttccagtagccagcagtcagatgggcactctggagagactgccggggataacccggaggaaggtggggatgacgtcaaatcatcatgccccttatgatttgggctacacacgtgctacaatggcagttacaaagagaagcgaaactgtgaagtggagcaaacctcaaaaaggctgtctcagttcggattgtagtctgcaactcgacnacatgaagctggaatcgctagtaatcgcagatcagaatgctgcggtgaatacgttcccgggtcttgtacacaccgcccgtcacaccatgggagtcggaaacgcccgaagtcagtgacccaaccgcaagg

SEQ ID NO: 73 - DNA, 1386 bp, Parabacteroides distasonis
  modified_base (3)..(3): a, c, t, g, unknown or other
tgnaagtcgaggggcagcacaggtagcaataccgggtggcgaccggcgcacgggtgagtaacgcgtatgcaacttgcctatcagagggggataacccggcgaaagtcggactaataccgcatgaagcagggatcccgcatgggaatatttgctaaagattcatcgctgatagataggcatgcgttccattaggcagttggcggggtaacggcccaccaaaccgacgatggataggggttctgagaggaaggtcccccacattggtactgagacacggaccaaactcctacgggaggcagcagtgaggaatattggtcaatgggcgagagcctgaaccagccaagtcgcgtgagggatgaaggttctatggatcgtaaacctcttttataagggaataaagtgcgggacgtgtcccgttttgtatgtaccttatgaataaggatcggctaactccgtgccagcagccgcggtaatacggaggatccgagcgttatccggatttattgggtttaaagggtgcgtaggcggccttttaagtcagcggtgaaagtctgtggctcaaccatagaattgccgttgaaactggggggcttgagtatgtttgaggcaggcggaatgcgtggtgtagcggtgaaatgcatagatatcacgcagaaccccgattgcgaaggcagcctgccaagccattactgacgctgatgcacgaaagcgtggggatcaaacaggattagataccctggtagtccacgcagtaaacgatgatcactagctgtttgcgatacactgtaagcggcacagcgaaagcgttaagtgatccacctggggagtacgccggcaacggtgaaactcaaaggaattgacgggggcccgcacaagcggaggaacatgtggtttaattcgatgatacgcgaggaaccttacccgggtttgaacgcattcggaccgaggtggaaacaccttttctagcaatagccgtttgcgaggtgctgcatggttgtcgtcagctcgtgccgtgaggtgtcggcttaagtgccataacgagcgcaacccttgccactagttactaacaggtaaagctgaggactctggtgggactgccagcgtaagctgcgaggaaggcggggatgacgtcaaatcagcacggcccttacatccggggcgacacacgtgttacaatggcgtggacaaagggaagccacctggcgacagggagcgaatccccaaaccacgtctcagttcggatcggagtctgcaacccgactccgtgaagctggattcgctagtaatcgcgcatcagccatggcgcggtgaatacgttcccgggccttgtacacaccgcccgtcaagccatgggagccgggggtacctgaagtccgtaaccgcgag

SEQ ID NO: 74 - DNA, 1394 bp, Clostridium fessum
  modified_base (4)..(6): a, c, t, g, unknown or other
  modified_base (23)..(27): a, c, t, g, unknown or other
  modified_base (29)..(29): a, c, t, g, unknown or other
  modified_base (54)..(54): a, c, t, g, unknown or other
tacnnntgcagtcgaacgaagcnnnnntngcggaagttttcggatggaagttanattgactgagtggcggacgggtgagtaacgcgtgggtaacctgcctcacactgggggacaacagttagaaatgactgctaataccgcataagcgcacaggaccgcatggtccggtgtgaaaaactccggtggtgtgagatggacccgcgtttgattagctagttggtggggtaacggcctaccaaggcgacgatcaatagccgacctgagagggtgaccggccacattgggactgagacacggcccaaactcctacgggaggcagcagtggggaatattgcacaatgggggaaaccctgatgcagcgacgccgcgtgagtgaagaagtatttcggtatgtaaagctctatcagcagggaagaaaatgacggtacctgactaagaagccccggctaactacgtgccagcagccgcggtaatacgtagggggcaagcgttatccggatttactgggtgtaaagggagcgtagacggtaaagcaagtctgaagtgaaagcccggggctcaaccccgggactgctttggaaactgtttaactagagtgctggagaggtaagcggaattcctagtgtagcggtgaaatgcgtagatattaggaggaacaccagtggcgaaggcggcttactggacagtaactgacgttgaggctcgaaagcgtggggagcaaacaggattagataccctggtagtccacgccgtaaacgatgaatactaggtgttgggggacaaagtccttcggtgccgtcgcaaacgcaataagtattccacctggggagtacgttcgcaagaatgaaactcaaaggaattgacggggacccgcacaagcggtggagcatgtggtttaattcgaagcaacgcgaagaaccttaccaaatcttgacatccctctgaccggcgagtaatgtcgcctttccttcgggacagaggagacaggtggtgcatggttgtcgtcagctcgtgtcgtgagatgttgggttaagtcccgcaacgagcgcaacccttatcctaagtagccagcagttcggctgggcactcttgggagactgccagggataacctggaggaaggtggggatgacgtcaaatcatcatgccccttatgatttgggctacacacgtgctacaatggcgtaaacaaagagaagcgagaccgcgaggtggagcaaatctcaaaaataacgtctcagttcggactgcaggctgcaactcgcctgcacgaagctggaatcgctagtaatcgcgaatcagaatgtcgcggtgaatacgttcccgggtcttgtacacaccgcccgtcacaccatgggagtcagtaatgcccgaagtcagtgacccaaccgtaag

SEQ ID NO: 75 - DNA, 1391 bp, Paraprevotella clara
tgcagtcgaggggcagcatggacccagctttgctgggtttgatggcgaccggcgcacgggtgagtaacgcgtatccaacctgccctttactccgggatagtctcctgaaagggagtttaataccggatgtgtttgtctttccgcatgggagcgacaaataaagattaattggtaaaggatggggatgcgtcccattagcttgttggcggggtaacggcccaccaaggcgacgatgggtaggggttctgagaggaaggtcccccacattggaactgagacacggtccaaactcctacgggaggcagcagtgaggaatattggtcaatgggcgggagcctgaaccagccaagtagcgtgaaggacgacggccctacgggttgtaaacttcttttataagggaataaagttcgccacgtgtggtgttttgtatgtaccttatgaataagcatcggctaattccgtgccagcagccgcggtaatacggaagatgcgagcgttatccggatttattgggtttaaagggagcgtaggcgggcttttaagtcagcggtcaaatgtcgtggctcaaccatgtcaagccgttgaaactgtaagccttgagtctgcacagggcacatggaattcgtggtgtagcggtgaaatgcttagatatcacgaagaactccgatcgcgaaggcattgtgccggggcataactgacgctgaggctcgaaagtgcgggtatcaaacaggattagataccctggtagtccgcacggtaaacgatgaatgctcgctatgggcgatatattgtccgtggccaagcgaaagcgttaagcattccacctggggagtacgccggcaacggtgaaactcaaaggaattgacgggggcccgcacaagcggaggaacatgtggtttaattcgatgatacgcgaggaaccttacccgggcttgaattgcaggtgcatgagtcagagatgattctttccttcgggactcctgtgaaggtgctgcatggttgtcgtcagctcgtgccgtgaggtgtcggcttaagtgccataacgagcgcaacccttctccccagttgccatcgggtaatgccgggccctctggggacactgccatcgtaagatgcgaggaaggtggggatgacgtcaaatcagcacggcccttacgtccggggccacacacgtgttacaatggggggtacagagggccgctgtccggtgacggtcggccaatccctaaaacccctctcagttcggactggagtctgcaacccgactccacgaagctggattcgctagtaatcgcgcatcagccatggcgcggtgaatacgttcccgggccttgtacacaccgcccgtcaagccatgaaagccgggggtgcctgaagtccgtgaccgcgag

SEQ ID NO: 76 - DNA, 1386 bp, Bacteroides thetaiotaomicron
  modified_base (1384)..(1384): a, c, t, g, unknown or other
tcgaggggcagcatttcagtttgcttgcaactggagatggcgaccggcgcacgggtgagtaacacgtatccaacctgccgataactcggggatagcctttcgaaagaaagattaatacccgatggtataattagaccgcatggtcttgttattaaagaatttcggttatcgatggggatgcgttccattaggcagttggtgaggtaacggctcaccaaaccttcgatggataggggttctgagaggaaggtcccccacattggaactgagacacggtccaaactcctacgggaggcagcagtgaggaatattggtcaatgggcgcaggcctgaaccagccaagtagcgtgaaggatgactgccctatgggttgtaaacttcttttatatgggaataaagttttccacgtgtggaattttgtatgtaccatatgaataaggatcggctaactccgtgccagcagccgcggtaatacggaggatccgagcgttatccggatttattgggtttaaagggagcgtaggtggacagttaagtcagttgtgaaagtttgcggctcaaccgtaaaattgcagttgatactggctgtcttgagtacagtagaggtgggcggaattcgtggtgtagcggtgaaatgcttagatatcacgaagaactccgattgcgaaggcagctcactggactgcaactgacactgatgctcgaaagtgtgggtatcaaacaggattagataccctggtagtccacacagtaaacgatgaatactcgctgtttgcgatatacagtaagcggccaagcgaaagcattaagtattccacctggggagtacgccggcaacggtgaaactcaaaggaattgacgggggcccgcacaagcggaggaacatgtggtttaattcgatgatacgcgaggaaccttacccgggcttaaattgcatttgaatatattggaaacagtatagccgtaaggcaaatgtgaaggtgctgcatggttgtcgtcagctcgtgccgtgaggtgtcggcttaagtgccataacgagcgcaacccttatctttagttactaacaggtcatgctgaggactctagagagactgccgtcgtaagatgtgaggaaggtggggatgacgtcaaatcagcacggcccttacgtccggggctacacacgtgttacaatggggggtacagaaggcagctacctggtgacaggatgctaatcccaaaagcctctctcagttcggatcgaagtctgcaacccgacttcgtgaagctggattcgctagtaatcgcgcatcagccatggcgcggtgaatacgttcccgggccttgtacacaccgcccgtcaagccatgaaagccgggggtacctgaagtacgtaaccgcaagnag

SEQ ID NO: 77 - DNA, 1397 bp, Sutterella wadsworthensis
  modified_base (5)..(8): a, c, t, g, unknown or other
  modified_base (790)..(790): a, c, t, g, unknown or other
gcaannnnaacggcagcgcggggagcttgctccctggcggcgagtggcgcacgggtgagtaatacatcggaacgtgtcttctagtgggggataactgcccgaaagggcagctaataccgcatgagacctgagggtgaaagcgggggatcgcaagacctcgcgctggaagagcggccgatgtccgattagctagttggtgaggtaaaggctcaccaaggcgacgatcggtagctggtctgagaggacgaccagccacactgggactgagacacggcccagactcctacgggaggcagcagtggggaattttggacaatgggggcaaccctgatccagccatgccgcgtgcaggatgaaggtcttcggattgtaaactgcttttgtcagggacgaaaagggatgcgataacaccgcattccgctgacggtacctgaagaataagcaccggctaactacgtgccagcagccgcggtaatacgtagggtgcaagcgttaatcggaattactgggcgtaaagcgtgcgcaggcggttctgtaagatagatgtgaaatccccgggctcaacctgggaattgcatatatgactgcaggacttgagtttgtcagaggagggtggaattccacgtgtagcagtgaaatgcgtagatatgtggaagaacaccgatggcgaaggcagccctctgggacatgactgacgctcatgcacgaaagcgtggggagcaaacaggattagataccctggtagtccacgccctaaacgatgtctactagttgttggggacgatagtcnttggtaacgcagctaacgcgtgaagtagaccgcctggggagtacggtcgcaagattaaaactcaaaggaattgacggggacccgcacaagcggtggatgatgtggattaattcgatgcaacgcgaaaaaccttacctagccttgacatgccaggaaggcctgagagatcaggccgtgcccgcaagggaatctggacacaggtgctgcatggctgtcgtcagctcgtgtcgtgagatgttgggttaagtcccgcaacgagcgcaacccttgtcattagttgctacgaaagggcactctaatgagactgccggtgacaaaccggaggaaggtggggatgacgtcaagtcctcatggcccttatggctagggcctcacacgtcatacaatggtcggaacagagggaagcgaagccgcgaggtgaagccaatcccagaaaaccgatcgtagtccggattgcagtctgcaactcgactgcatgaagtcggaatcgctagtaatcgcggatcagcatgccgcggtgaatacgttcccgggtcttgtacacaccgcccgtcacaccatgggagtggggttcaccagaagacgtttgcccaaccgaaaggaaggc

SEQ ID NO: 78 - DNA, 1393 bp, Blautia obeum
  modified_base (4)..(5): a, c, t, g, unknown or other
  modified_base (14)..(14): a, c, t, g, unknown or other
  modified_base (945)..(947): a, c, t, g, unknown or other
  modified_base (958)..(958): a, c, t, g, unknown or other
tacnntgcagtcgnacgggaaaccttttattgaagcttcggcagatttggctggtttctagtggcggacgggtgagtaacgcgtgggtaacctgccttatacagggggataacaaccagaaatggttgctaataccgcataagcgcacaggaccgcatggtccggtgtgaaaaactccggtggtataagatggacccgcgttggattagctagttggcagggtaacggcctaccaaggcgacgatccatagccggcctgagagggtgaacggccacattgggactgagacacggcccagactcctacgggaggcagcagtggggaatattgcacaatgggggaaaccctgatgcagcgacgccgcgtgaaggaagaagtatctcggtatgtaaacttctatcagcagggaagatagtgacggtacctgactaagaagccccggctaactacgtgccagcagccgcggtaatacgtagggggcaagcgttatccggatttactgggtgtaaagggagcgtagacggactggcaagtctgatgtgaaaggcgggggctcaacccctggactgcattggaaactgttagtcttgagtgccggagaggtaagcggaattcctagtgtagcggtgaaatgcgtagatattaggaggaacaccagtggcgaaggcggcttactggacggtaactgacgttgaggctcgaaagcgtggggagcaaacaggattagataccctggtagtccacgccgtaaacgatgaatactaggtgttggggagcaaagctcttcggtgccgccgcaaacgcattaagtattccacctggggagtacgttcgcaagaatgaaactcaaaggaattgacggggacccgcacaagcggtggagcatgtggtttaattcgaagcaacgcgaagaaccttaccaagtcttgacatccctctgaccnnnccttaaccgantctttccttcgggacaggggagacaggtggtgcatggttgtcgtcagctcgtgtcgtgagatgttgggttaagtcccgcaacgagcgcaacccctatccccagtagccagcggttcggccgggcactctgaggagactgccagggataacctggaggaaggcggggatgacgtcaaatcatcatgccccttatgatttgggctacacacgtgctacaatggcgtaaacaaagggaagcaagcctgcgaaggtaagcaaatcccaaaaataacgtcccagttcggactgcagtctgcaactcgactgcacgaagctggaatcgctagtaatcgcggatcagaatgccgcggtgaatacgttcccgggtcttgtacacaccgcccgtcacaccatgggagtcagtaacgcccgaagtcagtgacctaactgcaaaga

SEQ ID NO: 79 - DNA, 1392 bp, Clostridium clostridioforme
tgcagtcgaacgaagcaattaagatgaagttttcggatggaatcttgattgactgagtggcggacgggtgagtaacgcgtggataacctgcctcacactgggggataacagttagaaatgactgctaataccgcataagcgcacagtgccgcatggcagtgtgtgaaaaactccggtggtgtgagatggatccgcgtctgattagccagttggcggggtaacggcccaccaaagcgacgatcagtagccgacctgagagggtgaccggccacattgggactgagacacggcccaaactcctacgggaggcagcagtggggaatattgcacaatgggcgaaagcctgatgcagcgacgccgcgtgagtgaagaagtatttcggtatgtaaagctctatcagcagggaagaaaatgacggtacctgactaagaagccccggctaactacgtgccagcagccgcggtaatacgtagggggcaagcgttatccggatttactgggtgtaaagggagcgtagacggcgaagcaagtctgaagtgaaaacccagggctcaaccctgggactgctttggaaactgttttgctagagtgtcggagaggtaagtggaattcctagtgtagcggtgaaatgcgtagatattaggaggaacaccagtggcgaaggcggcttactggacgataactgacgttgaggctcgaaagcgtggggagcaaacaggattagataccctggtagtccacgccgtaaacgatgaatgctaggtgttggggggcaaagcccttcggtgccgccgcaaacgcagtaagcattccacctggggagtacgttcgcaagaatgaaactcaaaggaattgacggggacccgcacaagcggtggagcatgtggtttaattcgaagcaacgcgaagaaccttaccaagtcttgacatccccctgacgggccggtaacgcggcctttccttcgggacaggggagacaggtggtgcatggttgtcgtcagctcgtgtcgtgagatgttgggttaagtcccgcaacgagcgcaacccttatccttagtagccagcaggtagagccgggcactctagggagactgccagggataacctggaggaaggtggggatgacgtcaaatcatcatgccccttatgatttgggctacacacgtgctacaatggcgtaaacaaagggaagcgagacagtgatgtggagcaaatcccaaaaataacgtcccagttcggactgtagtctgcaacccgactacacgaagctggaatcgctagtaatcgcgaatcagaatgtcgcggtgaatacgttcccgggtcttgtacacaccgcccgtcacaccatgggagtcagcaacgcccgaagtcagtgacccaaccgaaaggagg

SEQ ID NO: 80 - DNA, 1389 bp, Sutterella massiliensis
cgaacggcagcacagggagcttgctcccgggtggcgagtggcgcacgggtgagtaatacatcggaacgtgtcctgttgtgggggataactgctcgaaagggtggctaataccgcatgagacctgagggtgaaagcgggggatcgcaagacctcgcgcaattggagcggccgatgcccgattagctagttggtgaggtaaaggctcaccaaggcgacgatcggtagctggtctgagaggacgaccagccacactgggactgagacacggcccagactcctacgggaggcagcagtggggaattttggacaatgggggcaaccctgatccagccatgccgcgtgcaggatgaaggccttcgggttgtaaactgcttttgtcaggacgaaaaggaccgtgttaataccatggtctgctgacggtacctgaagaataagcaccggctaactacgtgccagcagccgcggtaatacgtagggtgcaagcgttaatcggaattactgggcgtaaagcgtgcgcaggcggttctgtaagacagatgtgaaatccccgggctcaacctgggaattgcatttgtgactgcaggactagagttcatcagaggggggtggaattccaagtgtagcagtgaaatgcgtagatatttggaagaacaccaatggcgaaggcagccccctgggatgcgactgacgctcatgcacgaaagcgtggggagcaaacaggattagataccctggtagtccacgccctaaacgatgtctactggttgttggggttttttaaccttggtaacgaagctaacgcgtgaagtagaccgcctggggagtacggtcgcaagattaaaactcaaaggaattgacggggacccgcacaagcggtggatgatgtggattaattcgatgcaacgcgaaaaaccttacctagccttgacatgccaggaatcctgaagagattcgggagtgcccgcaagggaatctggacacaggtgctgcatggctgtcgtcagctcgtgtcgtgagatgttgggttaagtcccgcaacgagcgcaacccttgtcactagttgctacgcaagagcactctagtgagactgccggtgacaaaccggaggaaggtggggatgacgtcaagtcctcatggcccttatggctagggcctcacacgtcatacaatggtcggaacagagggcagcgaagccgcgaggtggagcaaatcccagaaaaccgatcgtagtccggattgcagtctgcaactcgactgcatgaagtcggaatcgctagtaatcgcggatcagcatgccgcggtgaatacgttcccgggtcttgtacacaccgcccgtcacaccatgggagtggggttcaccagaagacgtttgtttaaccgcaaggagga

SEQ ID NO: 81 - DNA, 1384 bp, Porphyromonas asaccharolytica
gtcgaggggcagcgagatgtagcaatacgtcgtcggcgaccggcgaatgggtgagtaacacgtatgcaacttacctcttagtggtgaataacccgatgaaagtcggactaatacaccatactctccttagatcacatgagaagaggaggaaagattaatcgctaagagatgggcctgcgttccattagctagttggtaaggtaacggcttaccaaggcaacgatggatagggggactgagaggttgaccccccacattgacactgagatacgggtcaaactcctacgggaggcagcagtgaggaatattggtcaatgggcgagagcctgaaccagccaagtcgcgtgaaggaagactgcccgcaagggttgtaaacttcttttgtgtgggattaaagtcacctacgtgtaggtgtttgcagttaccatacgaataagcatcggctaactccgtgccagcagccgcggtaatacggaggatgcgagcgttatccggaattattgggtttaaagggtgcgtaggttgcaagggaagtcaggggtgaaaagctgtagctcaactatggtcttgcctttgaaactctctagctagagtgtattggaggtacgtggaacgtgtggtgtagcggtgaaatgcatagatatcacacagaactccgattgcgcaggcagcgtactacattacaactgacactgaagcacgaaagcgtgggtatcaaacaggattagataccctggtagtccacgcagtaaacgatgaatactagatctatgcgatacacagtatgggtctaagcgaaagcgataagtattccacctgggggagtacgccggcaacggtgaaactcaaagagattggcgggggtccgcacaagcggaggaacatgtggtttaattcgatgatacgcgaggaaccttacccgggattgaaatgtagatgcatgaggctgagaggtctcttcccttcggggcttctatgtaggtgctgcatggttgtcgtcagctcgtgccgtgaggtgtcggcttaagtgccataacgagcgcaacccgcgtcgatagttactaacgagtcatgtcgaggactctatcgagacagccgtcgtaagacgtgaggaaggagcggatgacgtcaaatcagcacggcccttacatccggggcgacacacgtgttacaatggtagggacagcgagcagccatctggtgacagagagctaatctataaaccctatcccagttcggatcggagtctgcaactcgactctgtgaagctggattcgctagtaatcgcgcatcagccatggcgcggtgaatacgttcccggaccttgcacacaccgcccgtcaagccatgggagtcgggggtacctgaagagcgtgaccgtcac

SEQ ID NO: 82 - DNA, 1387 bp, Unknown
  Description of Unknown: Ruminococcaceae sp. FBI00082 FBI00097 sequence
tgcagtcgaacggagctattttggcggaacccttcggggggaagctggtttagcttagtggcggacgggtgagtaacacgtgagcaacctgcctttcagagggggataacgtttggaaacgaacgctaataccgcataacgcagcgggccggcatcggcctgctgccaaaggagcaatccgctgaaagatgggctcgcgtccgattagatagttggtgaggtaacggcccaccaagtcgacgatcggtagccggactgagaggttgaacggccacattgggactgagacacggcccagactcctacgggaggcagcagtgggggatattgcacaatgggcgaaagcctgatgcagcgacgccgcgtgagggaagacggccttcgggttgtaaacctctgtctttggggacgataatgacggtacccaaggaggaagctccggctaactacgtgccagcagccgcggtaatacgtagggagcgagcgttgtccggaattactgggtgtaaagggagcgtaggcgggagtgcaagttggatgtgaaaaccacgggctcaacccatggactgcattcaaaactgtatttcttgagtgatgtagaggcaggcggaattcctagtgtagcggtgaaatgcgtagatattaggaggaacaccagtggcgaaggcggcctgctgggcatttactgacgctgaggctcgaaagtgtggggagcaaacaggattagataccctggtagtccacaccgtaaacgatgattactaggtgtgggtgcgtcaagcatccgtgccggagttaacacaataagtaatccacctggggagtacgaccgcaaggttgaaactcaaaggaattgacgggggcccgcacaagcagtggagtatgtggtttaattcgaagcaacgcgaagaaccttaccaggtcttgacatcggatgcatagcttagagataagtgaagtccttcgggacatccagacaggtggtgcatggttgtcgtcagctcgtgtcgtgagatgttgggttaagtcccgcaacgagcgcaacccttatgtttagttgctacgcaagagcactctaaagagactgccgttgacaaaacggaggaaggtggggatgacgtcaaatcatcatgccccttatgacctgggccacacacgtactacaatggcgatcaacagagggaagcaaagccgcgaggcagagcaaacccctaaaagtcgtctcagttcggattgcaggctgcaacccgcctgcatgaagccggaattgctagtaatcgcggatcagcatgccgcggtgaatacgttcccgggccttgtacacaccgcccgtcacaccatggaagtcggtaacacccgaagccagtagcccaaccgcaaggaggac

SEQ ID NO: 83 - DNA, 1392 bp, Alistipes shahii
  modified_base (28)..(29): a, c, t, g, unknown or other
tgcagtcgaggggcagcacggtgtagcnntacactggtggcgaccggcgcacgggtgcgtaacgcgtatgcaacctacccataacagggggataacactgagaaattggtactaataccccataacatcaggaccggcatcggttctggttgaaaactccggtggttatggatgggcatgcgttgtattagctggttggtgaggtaacggctcaccaaggcaacgatacatagggggactgagaggttaaccccccacattggtactgagacacggaccaaactcctacgggaggcagcagtgaggaatattggtcaatggacgcaagtctgaaccagccatgccgcgtgcaggaagacggctctatgagttgtaaactgcttttgtacgagggtaaacgctcttacgtgtaagagcctgaaagtatcgtacgaataaggatcggctaactccgtgccagcagccgcggtaatacggaggatccaagcgttatccggatttattgggtttaaagggtgcgtaggcggtttgataagttagaggtgaaataccggtgcttaacaccggaactgcctctaatactgttgaactagagagtagttgcggtaggcggaatgtatggtgtagcggtgaaatgcttagagatcatacagaacaccgattgcgaaggcagcttaccaaactatatctgacgttgaggcacgaaagcgtggggagcaaacaggattagataccctggtagtccacgcagtaaacgatgataactcgctgtcggcgatacacggtcggcggctaagcgaaagcgataagttatccacctggggagtacgttcgcaagaatgaaactcaaaggaattgacggggggcccgcacaagcggaggaacatgtggtttaattcgatgatacgcgaggaaccttacccgggcttgaaagttactgacgattctggaaacaggatttcccttcggggcaggaaactaggtgctgcatggttgtcgtcagctcgtgccgtgaggtgtcgggttaagtcccataacgagcgcaacccctaccgttagttgccatcaggtcaagctgggcactctggcgggactgccggtgtaagccgagaggaaggtggggatgacgtcaaatcagcacggcccttacgtccggggctacacacgtgttacaatggtaggtacagagggcagctacccagtgatgggatgcgaatctcgaaagcctatctcagttcggatcggaggctgaaacccgcctccgtgaagttggattcgctagtaatcgcgcatcagccatggcgcggtgaatacgttcccgggccttgtacacaccgcccgtcaagccatggaagctgggggtgcctgaagttcgtgaccgcaaggagcgac

SEQ ID NO: 84 - DNA, 1247 bp, Bifidobacterium longum
  modified_base (1)..(6): a, c, t, g, unknown or other
  modified_base (9)..(12): a, c, t, g, unknown or other
  modified_base (14)..(20): a, c, t, g, unknown or other
  modified_base (22)..(24): a, c, t, g, unknown or other
  modified_base (26)..(26): a, c, t, g, unknown or other
  modified_base (28)..(28): a, c, t, g, unknown or other
  modified_base (31)..(39): a, c, t, g, unknown or other
  modified_base (41)..(46): a, c, t, g, unknown or other
  modified_base (48)..(53): a, c, t, g, unknown or other
  modified_base (55)..(55): a, c, t, g, unknown or other
  modified_base (58)..(74): a, c, t, g, unknown or other
  modified_base (76)..(76): a, c, t, g, unknown or other
  modified_base (78)..(79): a, c, t, g, unknown or other
  modified_base (81)..(82): a, c, t, g, unknown or other
  modified_base (84)..(89): a, c, t, g, unknown or other
  modified_base (91)..(91): a, c, t, g, unknown or other
  modified_base (97)..(107): a, c, t, g, unknown or other
  modified_base (109)..(109): a, c, t, g, unknown or other
  modified_base (112)..(114): a, c, t, g, unknown or other
  modified_base (116)..(119): a, c, t, g, unknown or other
  modified_base (121)..(125): a, c, t, g, unknown or other
  modified_base (129)..(129): a, c, t, g, unknown or other
  modified_base (131)..(132): a, c, t, g, unknown or other
  modified_base (134)..(135): a, c, t, g, unknown or other
  modified_base (141)..(145): a, c, t, g, unknown or other
  modified_base (162)..(162): a, c, t, g, unknown or other
  modified_base (164)..(164): a, c, t, g, unknown or other
  modified_base (175)..(177): a, c, t, g, unknown or other
  modified_base (189)..(189): a, c, t, g, unknown or other
  modified_base (204)..(204): a, c, t, g, unknown or other
  modified_base (206)..(206): a, c, t, g, unknown or other
  modified_base (208)..(210): a, c, t, g, unknown or other
  modified_base (212)..(213): a, c, t, g, unknown or other
  modified_base (216)..(216): a, c, t, g, unknown or other
  modified_base (224)..(224): a, c, t, g, unknown or other
  modified_base (271)..(271): a, c, t, g, unknown or other
  modified_base (1227)..(1227): a, c, t, g, unknown or other
  modified_base (1231)..(1234): a, c, t, g, unknown or other
  modified_base (1236)..(1236): a, c, t, g, unknown or other
  modified_base (1241)..(1247): a, c, t, g, unknown or other
nnnnnnaannnntnnnnnnnannngnanggnnnnnnnnntnnnnnntnnnnnncnggnnnnnnnnnnnnnnnnntngnngnnannnnnngngagggnnnnnnnnnnncntgnnntnnnntnnnnnccananncnncgggannnnncagtggggaatattgcncnatgggcgcaannngatgcagcgacnccgcgtgagggatgnangnnntnnggntgtaaacntcttttatcggggagcaagcgagagtgagttacccgttgaataagcnccggctaactacgtgccagcagccgcggtaatacgtagggtgcaagcgttatccggaattattgggcgtaaagggctcgtaggcggttcgtcgcgtccggtgtgaaagtccatcgcttaacggtggatccgcgccgggtacgggcgggcttgagtgcggtaggggagactggaattcccggtgtaacggtggaatgtgtagatatcgggaagaacaccaatggcgaaggcaggtctctgggccgttactgacgctgaggagcgaaagcgtggggagcgaacaggattagataccctggtagtccacgccgtaaacggtggatgctggatgtggggcccgttccacgggttccgtgtcggagctaacgcgttaagcatcccgcctggggagtacggccgcaaggctaaaactcaaagaaattgacgggggcccgcacaagcggcggagcatgcggattaattcgatgcaacgcgaagaaccttacctgggcttgacatgttcccgacggtcgtagagatacggcttcccttcggggcgggttcacaggtggtgcatggtcgtcgtcagctcgtgtcgtgagatgttgggttaagtcccgcaacgagcgcaaccctcgccccgtgttgccagcggattatgccgggaactcacgggggaccgccggggttaactcggaggaaggtggggatgacgtcagatcatcatgccccttacgtccagggcttcacgcatgctacaatggccggtacaacgggatgcgacgcggcgacgcggagcggatccctgaaaaccggtctcagttcggatcgcagtctgcaactcgactgcgtgaaggcggagtcgctagtaatcgcgaatcagcaacgtcgcggtgaatgcgttcccgggccttgtacacaccgcccgtcaagtcatgaaagtgggcagcacccgaagccggtggcctaaccccttgngggnnnnancccgnnnnnnn

SEQ ID NO: 85 - DNA, 1394 bp, Ruminococcus bromii
  modified_base (4)..(5): a, c, t, g, unknown or other
tgcnntcgaacggaactgttttgaaagatttcttcggaatgaatttgatttagtttagtggcggacgggtgagtaacgcgtgagtaacctgccttcaagagggggataacattctgaaaagaatgctaataccgcatgacatatcggaatcacatgattttgatatcaaagattttatcgcttgaagatggactcgcgtccgattagttagttggtgaggtaacggctcaccaagaccgcgatcggtagccggactgagaggttgaacggccacattgggactgagacacggcccagactcctacgggaggcagcagtgggggatattgcgcaatgggggcaaccctgacgcagcaacgccgcgtgaaggatgaaggttttcggattgtaaacttcttttattaaggacgaaacttgacggtacttaatgaataagctccggctaactacgtgccagcagccgcggtaatacgtagggagcaagcgttgtccggatttactgggtgtaaagggtgcgtaggcggctttgcaagtcagatgtgaaatctatgggctcaacccataaactgcatttgaaactgtagagcttgagtgaagtagaggcaggcggaattccccgtgtagcggtgaaatgcgtagagatggggaggaacaccagtggcgaaggcggcctgctgggctttaactgacgctgaggcacgaaagcgtgggtagcaaacaggattagataccctggtagtccacgctgtaaacgatgattactaggtgtggggggtctgaccccttccgtgccggagttaacacaataagtaatccacctggggagtacggccgcaaggttgaaactcaaaggaattgacgggggcccgcacaagcagtggagtatgtggtttaattcgaagcaacgcgaagaaccttaccaggtcttgacatccaactaacgaagtagagatacattaggtgcccttcggggaaagttgagacaggtggtgcatggttgtcgtcagctcgtgtcgtgagatgttgggttaagtcccgcaacgagcgcaacccttgctattagttgctacgcaagagcactctaataggactgccgttgacaaaacggaggaaggtggggacgacgtcaaatcatcatgccccttatgacctgggctacacacgtactacaatggatgttaacagagggaagcaagacagcgatgtggagcaaacccctaaaaacattctcagttcagattgcaggctgcaacccgcctgcatgaagatggaattgctagtaatcgcggatcagcatgccgcggtgaatacgttcccgggccttgtacacaccgcccgtcacaccatgggagccggtaatacccgaagtcagtagtccaacctcgtgaggacgc

SEQ ID NO: 86 - DNA, 1399 bp, Ruminococcus bromii
  modified_base (9)..(9): a, c, t, g, unknown or other
tgcagtcgnacggaactgttttgaaagatttcttcggaatgaatttgatttagtttagtggcggacgggtgagtaacgcgtgagtaacctgccttcaagagggggataacattctgaaaagaatgctaataccgcatgacatatcggaaccacatggttttgatatcaaagattttatcgcttgaagatggactcgcgtccgattagttagttggtgaggtaacggctcaccaagaccgcgatcggtagccggactgagaggttgaacggccacattgggactgagacacggcccagactcctacgggaggcagcagtgggggatattgcgcaatgggggcaaccctgacgcagcaacgccgcgtgaaggatgaaggttttcggattgtaaacttcttttattaaggacgaaaattgacggtacttaatgaataagctccggctaactacgtgccagcagccgcggtaatacgtagggagcaagcgttgtccggatttactgggtgtaaagggtgcgtaggcggctttgcaagtcagatgtgaaatctatgggctcaacccataaactgcatttgaaactgtagagcttgagtgaagtagaggcaggcggaattccccgtgtagcggtgaaatgcgtagagatggggaggaacaccagtggcgaaggcggcctgctgggctttaactgacgctgaggcacgaaagcgtgggtagcaaacaggattagataccctggtagtccacgctgtaaacgatgattactaggtgtggggggtctgaccccttccgtgccggagttaacacaataagtaatccacctggggagtacggccgcaaggttgaaactcaaaggaattgacgggggcccgcacaagcagtggagtatgtggtttaattcgaagcaacgcgaagaaccttaccaggtcttgacatccaactaacgaagtagagatacattaggtgcccttcggggaaagttgagacaggtggtgcatggttgtcgtcagctcgtgtcgtgagatgttgggttaagtcccgcaacgagcgcaacccttgctattagttgctacgcaagagcactctaataggactgccgttgacaaaacggaggaaggtggggacgacgtcaaatcatcatgccccttatgacctgggctacacacgtactacaatggatgttaacagagggaagcaagacagcgatgtggagcaaacccctaaaaacattctcagttcagattgcaggctgcaacccgcctgcatgaagatggaattgctagtaatcgcggatcagcatgccgcggtgaatacgttcccgggccttgtacacaccgcccgtcacaccatgggagccggtaatacccgaagtcagtagtccaacctcgtgaggacgctgccg

SEQ ID NO: 87 - DNA, 1257 bp, Clostridium scindens
  modified_base (3)..(9): a, c, t, g, unknown or other
  modified_base (12)..(13): a, c, t, g, unknown or other
  modified_base (15)..(16): a, c, t, g, unknown or other
  modified_base (20)..(26): a, c, t, g, unknown or other
  modified_base (28)..(40): a, c, t, g, unknown or other
  modified_base (43)..(45): a, c, t, g, unknown or other
  modified_base (47)..(50): a, c, t, g, unknown or other
  modified_base (52)..(53): a, c, t, g, unknown or other
  modified_base (55)..(61): a, c, t, g, unknown or other
  modified_base (63)..(64): a, c, t, g, unknown or other
  modified_base (66)..(66): a, c, t, g, unknown or other
  modified_base (68)..(72): a, c, t, g, unknown or other
  modified_base (74)..(79): a, c, t, g, unknown or other
  modified_base (81)..(93): a, c, t, g, unknown or other
  modified_base (95)..(96): a, c, t, g, unknown or other
  modified_base (101)..(101): a, c, t, g, unknown or other
  modified_base (106)..(109): a, c, t, g, unknown or other
  modified_base (111)..(111): a, c, t, g, unknown or other
  modified_base (114)..(116): a, c, t, g, unknown or other
  modified_base (119)..(120): a, c, t, g, unknown or other
  modified_base (122)..(132): a, c, t, g, unknown or other
  modified_base (135)..(137): a, c, t, g, unknown or other
  modified_base (142)..(148): a, c, t, g, unknown or other
  modified_base (156)..(156): a, c, t, g, unknown or other
  modified_base (163)..(163): a, c, t, g, unknown or other
  modified_base (165)..(165): a, c, t, g, unknown or other
  modified_base (167)..(167): a, c, t, g, unknown or other
  modified_base (175)..(175): a, c, t, g, unknown or other
  modified_base (184)..(188): a, c, t, g, unknown or other
  modified_base (191)..(191): a, c, t, g, unknown or other
  modified_base (196)..(199): a, c, t, g, unknown or other
  modified_base (209)..(210): a, c, t, g, unknown or other
  modified_base (213)..(213): a, c, t, g, unknown or other
  modified_base (215)..(216): a, c, t, g, unknown or other
  modified_base (220)..(220): a, c, t, g, unknown or other
  modified_base (233)..(234): a, c, t, g, unknown or other
  modified_base (239)..(239): a, c, t, g, unknown or other
  modified_base (249)..(250): a, c, t, g, unknown or other
  modified_base (259)..(259): a, c, t, g, unknown or other
  modified_base (261)..(261): a, c, t, g, unknown or other
  modified_base (1248)..(1251): a, c, t, g, unknown or other
  modified_base (1253)..(1257): a, c, t, g, unknown or other
ccnnnnnnnaanncnnaagnnnnnnntnnnnnnnnnnnnnccnnngnnnnanntnnnnnnntnnantnnnnntnnnnnngnnnnnnnnnnnnngnngatcngtagnnnncngannnggnngnnnnnnnnnnnggnnntgagnnnnnnnccagactnctacggnangnagcagtgnggatattgnnnnnggnggaannnngatgcagcgnngcngnntgangatgaagtatttnnggtangtaaacttcnntcagcaggnangaagatgacggtacctgactaagaagccccggctaactacgtgccagcagccgcggtaatacgtagggggcaagcgttatccggatttactgggtgtaaagggagcgtagacggcgatgcaagccagatgtgaaagcccggggctcaaccccgggactgcatttggaactgcgtggctggagtgtcggagaggcaggcggaattcctagtgtagcggtgaaatgcgtagatattaggaggaacaccagtggcgaaggcggcctgctggacgatgactgacgttgaggctcgaaagcgtggggagcaaacaggattagataccctggtagtccacgccgtaaacgatgactactaggtgtcgggtggcaaggccattcggtgccgcagcaaacgcaataagtagtccacctggggagtacgttcgcaagaatgaaactcaaaggaattgacggggacccgcacaagcggtggagcatgtggtttaattcgaagcaacgcgaagaaccttacctgatcttgacatcccgatgccaaagcgcgtaacgcgctctttcttcggaacatcggtgacaggtggtgcatggttgtcgtcagctcgtgtcgtgagatgttgggttaagtcccgcaacgagcgcaacccctatcttcagtagccagcatttcggatgggcactctggagagactgccagggacaacctggaggaaggtggggatgacgtcaaatcatcatgccccttatgaccagggctacacacgtgctacaatggcgtaaacaaagggaggcgaacccgcgagggtgggcaaatcccaaaaataacgtctcagttcggattgtagtctgcaactcgactacatgaagctggaatcgctagtaatcgcgaatcagaatgtcgcggtgaatacgttcccgggtcttgtacacaccgcccgtcacaccatgggagtcagtaacgcccgaagccggtgacccaacccgcaagggaggnnnncnnnnn

SEQ ID NO: 88 - DNA, 1397 bp, Lactobacillus rogosae
tgcagtcgaacgaagcatttaagacagattacttcggtttgaagtcttttatgactgagtggcggacgggtgagtaacgcgtgggtaacctgcctcatacagggggatagcagctggaaacggctggtaataccgcataagcgcacagtaccacatggtacagtgtgaaaaactccggtggtatgagatggacccgcgtctgattagctggttggtgaggtaacggcccaccaaggcgacgatcagtagccgacctgagagggtgaccggccacattgggactgagacacggcccagactcctacgggaggcagcagtggggaatattgcacaatggaggaaactctgatgcagcgacgccgcgtgagtgaagaagtagttcgctatgtaaagctctatcagcagggaagatagtgacggtacctgactaagaagctccggctaaatacgtgccagcagccgcggtaatacgtatggagcaagcgttatccggatttactgggtgtaaagggagtgtaggtggccaggcaagtcagaagtgaaagcccggggctcaaccccgggactgcttttgaaactgcagggctagagtgcaggaggggcaagtggaattcctagtgtagcggtgaaatgcgtagatattaggaggaacaccagtggcgaaggcggcttgctggactgtaactgacactgaggctcgaaagcgtggggagcaaacaggattagataccctggtagtccacgccgtaaacgatgaatactaggtgtcggggcacataagtgcttcggtgccgcagcaaacgcaataagtattccacctggggagtacgttcgcaagaatgaaactcaaaggaattgacggggacccgcacaagcggtggagcatgtggtttaattcgaagcaacgcgaagaaccttaccaagtcttgacatcctcttgaccggtcagtaatgtgaccttttcttcggaacaagagtgacaggtggtgcatggttgtcgtcagctcgtgtcgtgagatgttgggttaagtcccgcaacgagcgcaacccttatccttagtagccagcagttcggctgggcactctagggagactgccagggataacctggaggaaggtggggatgacgtcaaatcatcatgccccttatgacttgggctacacacgtgctacaatggcgtaaacaaagtgaagcgagagtgtgagcttaagcaaatcacaaaaataacgtctcagttcggattgtagtctgcaactcgactacatgaagctggaatcgctagtaatcgcagatcagaatgctgcggtgaatacgttcccgggtcttgtacacaccgcccgtcacaccatgggagtcggaaatgcccgaagtcggtgacctaacgtaagaaggagcc

SEQ ID NO: 89 - DNA, 1251 bp, Bifidobacterium longum
  modified_base (1)..(5): a, c, t, g, unknown or other
  modified_base (7)..(15): a, c, t, g, unknown or other
  modified_base (17)..(22): a, c, t, g, unknown or other
  modified_base (24)..(26): a, c, t, g, unknown or other
  modified_base (28)..(28): a, c, t, g, unknown or other
  modified_base (31)..(35): a, c, t, g, unknown or other
  modified_base (37)..(38): a, c, t, g, unknown or other
  modified_base (40)..(63): a, c, t, g, unknown or other
  modified_base (69)..(70): a, c, t, g, unknown or other
  modified_base (72)..(73): a, c, t, g, unknown or other
  modified_base (77)..(84): a, c, t, g, unknown or other
  modified_base (86)..(86): a, c, t, g, unknown or other
  modified_base (89)..(91): a, c, t, g, unknown or other
  modified_base (93)..(93): a, c, t, g, unknown or other
  modified_base (95)..(95): a, c, t, g, unknown or other
  modified_base (97)..(97): a, c, t, g, unknown or other
  modified_base (103)..(104): a, c, t, g, unknown or other
  modified_base (106)..(107): a, c, t, g, unknown or other
  modified_base (111)..(112): a, c, t, g, unknown or other
  modified_base (118)..(128): a, c, t, g, unknown or other
  modified_base (131)..(132): a, c, t, g, unknown or other
  modified_base (134)..(134): a, c, t, g, unknown or other
  modified_base (141)..(143): a, c, t, g, unknown or other
  modified_base (146)..(149): a, c, t, g, unknown or other
  modified_base (151)..(151): a, c, t, g, unknown or other
  modified_base (158)..(159): a, c, t, g, unknown or other
  modified_base (162)..(162): a, c, t, g, unknown or other
  modified_base (164)..(164): a, c, t, g, unknown or other
  modified_base (167)..(168): a, c, t, g, unknown or other
  modified_base (174)..(175): a, c, t, g, unknown or other
  modified_base (179)..(180): a, c, t, g, unknown or other
  modified_base (182)..(182): a, c, t, g, unknown or other
  modified_base (201)..(201): a, c, t, g, unknown or other
  modified_base (204)..(204): a, c, t, g, unknown or other
  modified_base (210)..(213): a, c, t, g, unknown or other
  modified_base (234)..(234): a, c, t, g, unknown or other
  modified_base (257)..(257): a, c, t, g, unknown or other
  modified_base (262)..(263): a, c, t, g, unknown or other
  modified_base (267)..(268): a, c, t, g, unknown or other
  modified_base (288)..(288): a, c, t, g, unknown or other
  modified_base (1243)..(1250): a, c, t, g, unknown or other
nnnnngnnnnnnnnnannnnnntnnnangtnnnnnanntnnnnnnnnnnnnnnnnnnnnnnnnagctgnngnngggnnnnnnnncnccnnngntngncgggtnncnnctgnnagggcnnnnnnnnnnnggnntnagatacnnnccnnnntnctacggnnggnancanngggganntgcnnangggcgcaagcctgatgcancgncgccgnnnnagggatggaggccttcgggtngtaaacctctttatcggggagcnagcgnnagtnngtttacccgttgaataagcnccggctaactacgtgccagcagccgcggtaatacgtagggtgcaagcgttatccggaattattgggcgtaaagggctcgtaggcggttcgtcgcgtccggtgtgaaagtccatcgcttaacggtggatccgcgccgggtacgggcgggcttgagtgcggtaggggagactggaattcccggtgtaacggtggaatgtgtagatatcgggaagaacaccaatggcgaaggcaggtctctgggccgttactgacgctgaggagcgaaagcgtggggagcgaacaggattagataccctggtagtccacgccgtaaacggtggatgctggatgtggggcccgttccacgggttccgtgtcggagctaacgcgttaagcatcccgcctggggagtacggccgcaaggctaaaactcaaagaaattgacgggggcccgcacaagcggcggagcatgcggattaattcgatgcaacgcgaagaaccttacctgggcttgacatgttcccgacggtcgtagagatgcggcttcccttcggggcgggttcacaggtggtgcatggtcgtcgtcagctcgtgtcgtgagatgttgggttaagtcccgcaacgagcgcaaccctcgccccgtgttgccagcggattatgccgggaactcacgggggaccgccggggttaactcggaggaaggtggggatgacgtcagatcatcatgccccttacgtccagggcttcacgcatgctacaatggccggtacaacgggatgcgacgcggcgacgcggagcggatccctgaaaaccggtctcagttcggatcgcagtctgcaactcgactgcgtgaaggcggagtcgctagtaatcgcgaatcagcaacgtcgcggtgaatgcgttcccgggccttgtacacaccgcccgtcaagtcatgaaagtgggcagcacccgaagccggtggcctaaccccttnnnnnnnng

SEQ ID NO: 90 - DNA, 1390 bp, Eubacterium eligens
  modified_base (22)..(22): a, c, t, g, unknown or other
  modified_base (31)..(31): a, c, t, g, unknown or other
  modified_base (38)..(38): a, c, t, g, unknown or other
  modified_base (1385)..(1385): a, c, t, g, unknown or other
tgcagtcgaacgaagcatttgnaacggattncttcggnttgaagttctttatgactgagtggcggacgggtgagtaacgcgtgggtaacctgccttgtactgggggatagcagctggaaacggctggtaataccgcataagcgcacaatgttgcatgacatggtgtgaaaaactccggtggtataagatggacccgcgtctgattagctagttggtgagataacagcccaccaaggcgacgatcagtagccgacctgagagggtgaccggccacattgggactgagacacggcccagactcctacgggaggcagcagtggggaatattgcacaatggaggaaactctgatgcagcgacgccgcgtgagtgaagaagtaattcgttatgtaaagctctatcagcagggaagatagtgacggtacctgactaagaagctccggctaaatacgtgccagcagccgcggtaatacgtatggagcaagcgttatccggatttactgggtgtaaagggagtgcaggtggccatgcaagtcagaagtgaaaatccggggctcaaccccggaactgcttttgaaactgtaaggctagagtgcaggaggggtgagtggaattcctagtgtagcggtgaaatgcgtagatattaggaggaacaccagtggcgaaggcggctcactggactgtaactgacactgaggctcgaaagcgtggggagcaaacaggattagataccctggtagtccacgccgtaaacgatgaatactaggtgtcggggcccataagggcttcggtgccgcagcaaacgcaataagtattccacctggggagtacgttcgcaagaatgaaactcaaaggaattgacggggacccgcacaagcggtggagcatgtggtttaattcgaagcaacgcgaagaaccttaccaagtcttgacatcccactgaccggacagtaatgtgtcctttccttcgggacagtggtgacaggtggtgcatggttgtcgtcagctcgtgtcgtgagatgttgggttaagtcccgcaacgagcgcaacccctatccttagtagccagcagtaagatgggcactctagggagactgccagggataacctggaggaaggtggggatgacgtcaaatcatcatgccccttatgacttgggctacacacgtgctacaatggcgtaaacaaagtgaagcgaagtcgtgaggccaagcaaatcacaaaaataacgtctcagttcggattgtagtctgcaactcgactacatgaagctggaatcgctagtaatcgcagatcagaatgctgcggtgaatacgttcccgggtcttgtacacaccgcccgtcacaccatgggagtcgaaaatgcccgaagtcggtgacctaacgnaagaa

SEQ ID NO: 91 - DNA, 1392 bp, Eubacterium rectale
tgcagtcgaacgaagcactttatttgatttccttcgggactgattattttgtgactgagtggcggacgggtgagtaacgcgtgggtaacctgccttgtacagggggataacagttggaaacggctgctaataccgcataagcgcacagcatcgcatgatgcagtgtgaaaaactccggtggtataagatggacccgcgttggattagctagttggtgaggtaacggcccaccaaggcgacgatccatagccgacctgagagggtgaccggccacattgggactgagacacggcccaaactcctacgggaggcagcagtggggaatattgcacaatgggcgaaagcctgatgcagcgacgccgcgtgagcgaagaagtatttcggtatgtaaagctctatcagcagggaagataatgacggtacctgactaagaagcaccggctaaatacgtgccagcagccgcggtaatacgtatggtgcaagcgttatccggatttactgggtgtaaagggagcgcaggcggtgcggcaagtctgatgtgaaagcccggggctcaaccccggtactgcattggaaactgtcgtactagagtgtcggaggggtaagcggaattcctagtgtagcggtgaaatgcgtagatattaggaggaacaccagtggcgaaggcggcttactggacgataactgacgctgaggctcgaaagcgtggggagcaaacaggattagataccctggtagtccacgccgtaaacgatgaatactaggtgttgggaagcattgcttctcggtgccgtcgcaaacgcagtaagtattccacctggggagtacgttcgcaagaatgaaactcaaaggaattgacggggacccgcacaagcggtggagcatgtggtttaattcgaagcaacgcgaagaaccttaccaagtcttgacatccttctgaccggtacttaaccgtaccttctcttcggagcaggagtgacaggtggtgcatggttgtcgtcagctcgtgtcgtgagatgttgggttaagtcccgcaacgagcgcaacccttatctttagtagccagcggttcggccgggcactctagagagactgccagggataacctggaggaaggcggggatgacgtcaaatcatcatgccccttatgacttgggctacacacgtgctacaatggcgtaaacaaagggaagcaaagctgtgaagccgagcaaatctcaaaaataacgtctcagttcggactgtagtctgcaacccgactacacgaagctggaatcgctagtaatcgcagatcagaatgctgcggtgaatacgttcccgggtcttgtacacaccgcccgtcacaccatgggagttgggaatgcccgaagccagtgacctaaccgaaaggaa

SEQ ID NO: 92 - DNA, 1389 bp, Unknown
  Description of Unknown: Monoglobus pectinilyticus sequence
tgcagtcgagcgagaaatttttaacggattccttcggggagaagataaggatggaaagcggcggacgggtgagtaacgcgtgagtaacctgcctttaggagggggacaacattccgaaagggatgctaataccgcataaaattattgtatcgcatggtatgataatcaaagatttatcgcctaaagatggactcgcgtccgattagctagttggtggggtaaaagcctaccaaggcgacgatcggtagccgaactgagaggttgatcggccacattgggactgagacacggcccagactcctacgggaggcagcagtgggggatattgcgcaatgggggaaaccctgacgcagcaacgccgcgtgaaggaagaaggccttcgggttgtaaacttctttaagtgtggaagataatgacggtacacacagaataagccacggctaactacgtgccagcagccgcggtaatacgtaggtggcaagcgttgtccggatttactgggtgtaaagggcgtgtaggcgggtagacaagtcagatgtgaaataccggggctcaactccggggctgcatttgaaactgtatatcttgagtgtcggagaggaaagcggaattcctagtgtagcggtgaaatgcgtagatattaggaggaacaccagtggcgaaggcggctttctggacgataactgacgctgaggcgcgaaagcgtggggagcaaacaggattagataccctggtagtccacgccgtaaacgatggatactaggtgtaggaggtatcgaccccttctgtgccgcagttaacacaataagtatcccacctggggagtacggtcgcaagattgaaactcaaaggaattgacgggggcccgcacaagcagtggagtatgtggtttaattcgaagcaacgcgaagaaccttaccaggacttgacatcccacgcatagcctagagataggtgaagtcctacgggacgtggagacaggtggtgcatggttgtcgtcagctcgtgtcgtgagatgttgggttaagtcccgcaacgagcgcaacccttactgtcagttaccatcattaagttggggactctggcaggactgccggtgacaaatcggaggaaggtggggacgacgtcaaatcatcatgccccttatgtcctgggctacacacgtactacaatggctgtaaacagagtgaagcaaagcagtgatgtggagcaaaacacaaaaagcagtctcagttcagattgtaggctgaaactcgcctatatgaagtcggaattgctagtaatcgcagatcagcatgctgcggtgaatacgttcccgggccttgtacacaccgcccgtcacaccatgagagtcgataacacccgaagcctgtagcttaaccttaggga

SEQ ID NO: 93 - DNA, 1391 bp, Roseburia hominis
  modified_base (249)..(250): a, c, t, g, unknown or other
gcaagtcgaacgaagcactttaattgatttcttcggaatgaagtttttgtgactgagtggcggacgggtgagtaacgcgtgggtaacctgcctcatacagggggataacagttggaaacgactgctaataccgcataagcgcacaggattgcatgatccagtgtgaaaaactccggtggtatgagatggacccgcgtctgattagccagttggcggggtaacggcccaccaaagcgacgatcagtagcnnacctgagagggtgaccggccacattgggactgagacacggcccaaactcctacgggaggcagcagtggggaatattgcacaatgggggaaaccctgatgcagcgacgccgcgtgagcgaagaagtatttcggtatgtaaagctctatcagcagggaagaagaatgacggtacctgactaagaagcaccggctaaatacgtgccagcagccgcggtaatacgtatggtgcaagcgttatccggatttactgggtgtaaagggagcgcaggcggtacggcaagtctgatgtgaaatcccggggctcaaccccggtactgcattggaaactgtcggactagagtgtcggaggggtaagtggaattcctagtgtagcggtgaaatgcgtagatattaggaggaacaccagtggcgaaggcggcttactggacgattactgacgctgaggctcgaaagcgtggggagcaaacaggattagataccctggtagtccacgccgtaaacgatgaatactaggtgtcggggagcattgctcttcggtgccgcagcaaacgcaataagtattccacctggggagtacgttcgcaagaatgaaactcaaaggaattgacggggacccgcacaagcggtggagcatgtggtttaattcgaagcaacgcgaagaaccttaccaagtcttgacatcccactgaccaagtatgtaatgtacttttctcttcggagcagtggtgacaggtggtgcatggttgtcgtcagctcgtgtcgtgagatgttgggttaagtcccgcaacgagcgcaacccctattcttagtagccagcggttcggccgggcactctagggagactgccagggataacctggaggaaggtggggatgacgtcaaatcatcatgccccttatgacttgggctacacacgtgctacaatggcgtaaacaaagggaagcaatcccgcgagggggagcaaatctcaaaaataacgtctcagttcggactgtagtctgcaactcgactacacgaagctggaatcgctagtaatcgcgaatcagaatgtcgcggtgaatacgttcccgggtcttgtacacaccgcccgtcacaccatgggagttggtaatgcccgaagtcagtgacccaaccgcaagga

SEQ ID NO: 94 - DNA, 1290 bp, Enterococcus faecium
  modified_base (2)..(2): a, c, t, g, unknown or other
  modified_base (27)..(28): a, c, t, g, unknown or other
  modified_base (1027)..(1027): a, c, t, g, unknown or other
anacatgcagtcgtacgcttctttttnnccggagcttgctccaccggaaaaagaagagtggcgaacgggtgagtaacacgtgggtaacctgcccatcagaaggggataacacttggaaacaggtgctaataccgtataacaatcgaaaccgcatggttttgatttgaaaggcgctttcgggtgtcgctgatggatggacccgcggtgcattagctagttggtgaggtaacggctcaccaaggccacgatgcatagccgacctgagagggtgatcggccacattgggactgagacacggcccaaactcctacgggaggcagcagtagggaatcttcggcaatggacgaaagtctgaccgagcaacgccgcgtgagtgaagaaggttttcggatcgtaaaactctgttgttagagaagaacaaggatgagagtaactgttcatcccttgacggtatctaaccagaaagccacggctaactacgtgccagcagccgcggtaatacgtaggtggcaagcgttgtccggatttattgggcgtaaagcgagcgcaggcggtttcttaagtctgatgtgaaagcccccggctcaaccggggagggtcattggaaactgggagacttgagtgcagaagaggagagtggaattccatgtgtagcggtgaaatgcgtagatatatggaggaacaccagtggcgaaggcggctctctggtctgtaactgacgctgaggctcgaaagcgtggggagcaaacaggattagataccctggtagtccacgccgtaaacgatgagtgctaagtgttggagggtttccgcccttcagtgctgcagctaacgcattaagcactccgcctggggagtacgaccgcaaggttgaaactcaaaggaattgacgggggcccgcacaagcggtggagcatgtggtttaattcgaagcaacgcgaagaaccttaccaggtcttgacatcctttgaccactctagagatagagcttccccttcgggggcaaagtgacaggtggtgcatggtngtcgtcagctcgtgtcttgagatgttgggttaagtcccgcaacgagcgcaacccttattgttagttgccatcattcagttgggcactctagcaagactgccggtgacaaaccggaggaaggtggggatgacgtcaaatcatcatgccccttatgacctgggctacacacgtgctacaatgggaagtacaacgagttgcgaagtcgcgaggctaagctaatctcttaaagcttctctcagttcggattgcaggctgcaacttgc

SEQ ID NO: 95 - DNA, 1395 bp, Ruminococcus bromii
  modified_base (10)..(10): a, c, t, g, unknown or other
tgcagtcgancggaactgttttgaaagatttcttcggaatgaatttgatttagtttagtggcggacgggtgagtaacgcgtgagtaacctgccttcaagagggggataacattctgaaaagaatgctaataccgcatgacatatcggaaccacatggttttgatatcaaagattttatcgcttgaagatggactcgcgtccgattagttagttggtgaggtaacggctcaccaagaccgcgatcggtagccggactgagaggttgaacggccacattgggactgagacacggcccagactcctacgggaggcagcagtgggggatattgcgcaatgggggcaaccctgacgcagcaacgccgcgtgaaggatgaaggttttcggattgtaaacttcttttattaaggacgaaaattgacggtacttaatgaataagctccggctaactacgtgccagcagccgcggtaatacgtagggagcaagcgttgtccggatttactgggtgtaaagggtgcgtaggcggctttgcaagtcagatgtgaaatctatgggctcaacccataaactgcatttgaaactgtagagcttgagtgaagtagaggcaggcggaattccccgtgtagcggtgaaatgcgtagagatggggaggaacaccagtggcgaaggcggcctgctgggctttaactgacgctgaggcacgaaagcgtgggtagcaaacaggattagataccctggtagtccacgctgtaaacgatgattactaggtgtgggggggtctgaccccttccgtgccggagttaacacaataagtaatccacctggggagtacggccgcaaggttgaaactcaaaggaattgacgggggcccgcacaagcagtggagtatgtggtttaattcgaagcaacgcgaagaaccttaccaggtcttgacatccaactaacgaagtagagatacattaggtgcccttcggggaaagttgagacaggtggtgcatggttgtcgtcagctcgtgtcgtgagatgttgggttaagtcccgcaacgagcgcaacccttgctattagttgctacgcaagagcactctaataggactgccgttgacaaaacggaggaaggtggggacgacgtcaaatcatcatgccccttatgacctgggctacacacgtactacaatggatgttaacagagggaagcaagacagcgatgtggagcaaacccctaaaaacattctcagttcagattgcaggctgcaacccgcctgcatgaagatggaattgctagtaatcgcggatcagcatgccgcggtgaatacgttcccgggccttgtacacaccgcccgtcacaccatgggagccggtaatacccgaagtcagtagtccaacctcgtgaggacgc

SEQ ID NO: 96 - DNA, 1371 bp, Eggerthella lenta
  modified_base (2)..(3): a, c, t, g, unknown or other
  modified_base (5)..(5): a, c, t, g, unknown or other
anncntgcagtcgaacgatgaaaccgccctcgggcggacatgaagtggcgaacgggtgagtaacacgtgaccaacctgcccccctctccgggacaaccttgggaaaccgaggctaataccggatactccctcccctgctcctgcaggggtcgggaaagcccaggcggagggggatggggtcgcggcccattaggtagtaggcggggtaacggcccacctagcccgcgatgggtagccgggttgagagaccgaccggccacattgggactgagatacggcccagactcctacgggaggcagcagtggggaattttgcgcaatgggggcaaccctgacgcagcaacgccgcgtgcgggacgacggccttcgggttgtaaaccgctttcagcagggaagaaattcgacggtacctgcagaagaagctccggctaactacgtgccagcagccgcggtaatacgtagggagcgagcgttatccggattcattgggcgtaaagagcgcgtaggcggcctctcaagcgggatctctaatccgagggctcaacccccggccggatcccgaactgggaggctcgagttcggtagaggcaggcggaattcccggtgtagcggtggaatgcgcagatatcgggaagaacaccgatggcgaaggcagcctgctgggccgcaactgacgctgaggcgcgaaagctaggggagcgaacaggattagataccctggtagtcctagccgtaaacgatggatactaggtgtggggggctccgccctccgtgccgcagccaacgcattaagtatcccgcctggggagtacggccgcaaggctaaaactcaaaggaattgacgggggcccgcacaagcagcggagcatgtggcttaattcgaagcaacgcgaagaaccttaccagggcttgacatggacgtgaagccggggaaacccggtggccgagaggagcgtccgcaggtggtgcatggctgtcgtcagctcgtgtcgtgagatgttgggttaagtcccgcaacgagcgcaacccctgccccatgttgccagcattaggttggggactcatgggggactgccggcgtcaagccggaggaaggtggggacgacgtcaagtcatcatgccctttatgccctgggctgcacacgtgctacaatggccggtacaacgggctgcgagaccgcgaggtcgagcgaatccctcaaagccggccccagttcggatcggaggctgcaacccgcctccgtgaagtcggagttgctagtaatcgcggatcagcatgccgcggtgaatacgttcccgggccttgtacacaccgcccgtcacaccacccgagtcgtctgcacccgaagccgccggccgaacccgcaaggg

SEQ ID NO: 97 - DNA, 1384 bp, Unknown
  Description of Unknown: Ruminococcaceae sp. FBI00082 FBI00097 sequence
tgcagtcgaacggagctattttggcggaacccttcggggggaagctggtttagcttagtggcggacgggtgagtaacacgtgagcaacctgcctttcagagggggataacgtttggaaacgaacgctaataccgcataacgcagcgggccggcatcggcctgctgccaaaggagcaatccgctgaaagatgggctcgcgtccgattagatagttggtgaggtaacggcccaccaagtcgacgatcggtagccggactgagaggttgaacggccacattgggactgagacacggcccagactcctacgggaggcagcagtgggggatattgcacaatgggcgaaagcctgatgcagcgacgccgcgtgagggaagacggccttcgggttgtaaacctctgtctttggggacgataatgacggtacccaaggaggaagctccggctaactacgtgccagcagccgcggtaatacgtagggagcgagcgttgtccggaattactgggtgtaaagggagcgtaggcgggagtgcaagttggatgtgaaaaccacgggctcaacccatggactgcattcaaaactgtatttcttgagtgatgtagaggcaggcggaattcctagtgtagcggtgaaatgcgtagatattaggaggaacaccagtggcgaaggcggcctgctgggcatttactgacgctgaggctcgaaagtgtggggagcaaacaggattagataccctggtagtccacaccgtaaacgatgattactaggtgtgggtgcgtcaagcatccgtgccggagttaacacaataagtaatccacctggggagtacgaccgcaaggttgaaactcaaaggaattgacgggggcccgcacaagcagtggagtatgtggtttaattcgaagcaacgcgaagaaccttaccaggtcttgacatcggatgcatagcttagagataagtgaagtccttcgggacatccagacaggtggtgcatggttgtcgtcagctcgtgtcgtgagatgttgggttaagtcccgcaacgagcgcaacccttatgtttagttgctacgcaagagcactctaaagagactgccgttgacaaaacggaggaaggtggggatgacgtcaaatcatcatgccccttatgacctgggccacacacgtactacaatggcgatcaacagagggaagcaaagccgcgaggcagagcaaacccctaaaagtcgtctcagttcggattgcaggctgcaacccgcctgcatgaagccggaattgctagtaatcgcggatcagcatgccgcggtgaatacgttcccgggccttgtacacaccgcccgtcacaccatggaagtcggtaacacccgaagccagtagcccaaccgcaaggag

SEQ ID NO: 98 - DNA, 1398 bp, Bacteroides dorei
tgcagtcgaggggcagcatggtcttagcttgctaaggctgatggcgaccggcgcacgggtgagtaacacgtatccaacctgccgtctactcttggccagccttctgaaaggaagattaatccaggatgggatcatgagttcacatgtccgcatgattaaaggtattttccggtagacgatggggatgcgttccattagatagtaggcggggtaacggcccacctagtcaacgatggataggggttctgagaggaaggtcccccacattggaactgagacacggtccaaactcctacgggaggcagcagtgaggaatattggtcaatgggcgatggcctgaaccagccaagtagcgtgaaggatgactgccctatgggttgtaaacttcttttataaaggaataaagtcgggtatgcatacccgtttgcatgtactttatgaataaggatcggctaactccgtgccagcagccgcggtaatacggaggatccgagcgttatccggatttattgggtttaaagggagcgtagatggatgtttaagtcagttgtgaaagtttgcggctcaaccgtaaaattgcagttgatactggatgtcttgagtgcagttgaggcaggcggaattcgtggtgtagcggtgaaatgcttagatatcacgaagaactccgattgcgaaggcagcctgctaagctgcaactgacattgaggctcgaaagtgtgggtatcaaacaggattagataccctggtagtccacacggtaaacgatgaatactcgctgtttgcgatatacggcaagcggccaagcgaaagcgttaagtattccacctggggagtacgccggcaacggtgaaactcaaaggaattgacgggggcccgcacaagcggaggaacatgtggtttaattcgatgatacgcgaggaaccttacccgggcttaaattgcactcgaatgatccggaaacggttcagctagcaatagcgagtgtgaaggtgctgcatggttgtcgtcagctcgtgccgtgaggtgtcggcttaagtgccataacgagcgcaacccttgttgtcagttactaacaggtgatgctgaggactctgacaagactgccatcgtaagatgtgaggaaggtggggatgacgtcaaatcagcacggcccttacgtccggggctacacacgtgttacaatggggggtacagagggccgctaccacgcgagtggatgccaatccctaaaacccctctcagttcggactggagtctgcaacccgactccacgaagctggattcgctagtaatcgcgcatcagccacggcgcggtgaatacgttcccgggccttgtacacaccgcccgtcaagccatgggagccgggggtacctgaagtgcgtaaccgcgaggatcgc

SEQ ID NO: 99 - DNA, 1379 bp, Gordonibacter pamelaeae
  modified_base (2)..(3): a, c, t, g, unknown or other
  modified_base (15)..(15): a, c, t, g, unknown or other
anncatgcagtcgancgattaagacgccttcgggcgtgcatagagtggcgaacgggtgagtaacacgtgaccaacctgccccctaccccgggataacgcaaggaaacctgcgctaataccggatactccttcccctgctcctgcaggggtcgggaaagcccagacggtaggggatggggtcgcggcccattaggtagacggcggggcaacggcccaccgtgcctgcgatgggtagccgggttgagagaccgaccggccacattgggactgagatacggcccagactcctacgggaggcagcagtggggaattttgcgcaatggggggaaccctgacgcagcaacgccgcgtgcgggatgaaggccttcgggttgtaaaccgctttcagcagggaagatagtgacggtacctgcagaagaagccccggctaactacgtgccagcagccgcggtaatacgtagggggcgagcgttatccggattcattgggcgtaaagcgcgcgtaggcggcccgtcaagcggaacctctaacccgagggctcaacccccggtcgggttccgaactggcaggctcgagtttggtagaggaagatggaattcccggtgtagcggtggaatgcgcagatatcgggaagaacaccgatggcgaaggcagtcttctgggccatcaactgacgctgaggcgcgaaagctgggggagcgaacaggattagataccctggtagtcccagccgtaaacgatgggtgctaggtgtggggggatcatccctccgtgccgcagccaacgcattaagcaccccgcctggggagtacggccgcaaggctaaaactcaaaggaattgacgggggcccgcacaagcagcggagcatgtggcttaattcgaagcaacgcgaagaaccttaccagggcttgacatgctagtgaagccggggaaacccggtggccgagaggagctagcgcaggtggtgcatggctgtcgtcagctcgtgtcgtgagatgttgggttaagtcccgcaacgagcgcaacccctatcgtatgttgccagcattgagttggggactcatacgagactgccggcgtcaagccggaggaaggtggggacgacgtcaagtcatcatgccctttatgccctgggctgcacacgtgctacaatggccggtacaacgggccgcgacctggcgacaggaagcgaatccctcaaagccggccccagttcggatcggaggctgcaacccgcctccgtgaagtcggagttgctagtaatcgcggatcagcatgccgcggtgaatacgttcccgggccttgtacacaccgcccgtcacaccacccgagtcgtctgcacccgaagccgccggccgaacccgcaaggggcggaggc

SEQ ID NO: 100 - DNA, 1399 bp, Lachnospira sp.
  modified_base (5)..(5): a, c, t, g, unknown or other
  modified_base (672)..(672): a, c, t, g, unknown or other
ttacncatgcagtcgaacgaagcatttaagacggattttttcggaatgaagttttttatgactgagtggcggacgggtgagtaacgcgtgggtaacctgcctcacacagggggatagcagttggaaacgactggtaataccgcataagcgcacagcttcgcatgaagcggtgtgaaaaactccggtggtgtgagatggacccgcgtctgattaggtagttggtgaggtaacggcccaccaagccgacgatcagtagccgacctgagagggtgaccggccacattgggactgagacacggcccagactcctacgggaggcagcagtggggaatattgcacaatggaggaaactctgatgcagcgacgccgcgtgagtgaagaagtatttcggtatgtaaagctctatcagcagggaagacagtgacggtacctgactaagaagctccggctaaatacgtgccagcagccgcggtaatacgtatggagcaagcgttatccggatttactgggtgtaaagggagtgtaggtggtatcacaagtcagaagtgaaagcccggggctcaaccccgggactgcttttgaaactgtggaactggagtgcaggagaggtaagtggaattcctagtgtagcggtgaaatgcgtagatattaggaggaacaccagtggcgaanggcggcttactggactgtaactgacactgaggctcgaaagcgtggggagcaaacaggattagataccctggtagtccacgccgtaaacgatgaatactaggtgtcggggctcataagagcttcggtgccgcagcaaacgcaataagtattccacctggggagtacgttcgcaagaatgaaactcaaaggaattgacggggacccgcacaagcggtggagcatgtggtttaattcgaagcaacgcgaagaaccttaccaagtcttgacatccttctgaccggacagtaatgtgtcctttccttcgggacagaagagacaggtggtgcatggttgtcgtcagctcgtgtcgtgagatgttgggttaagtcccgcaacgagcgcaacccctatcctcagtagccagcaggtaaagctgggcactctgtggagactgccagggataacctggaggaaggtggggatgacgtcaaatcatcatgccccttatgacttgggctacacacgtgctacaatggcgtaaacaaagtgaagcgagagtgtgagcttaagcaaatcacaaaaataacgtctcagttcggattgtagtctgcaactcgactacatgaagctggaatcgctagtaatcgcgaatcagaatgtcgcggtgaatacgttcccgggtcttgtacacaccgcccgtcacaccatgggagtcggaaatgcccgaagtcggtgacctaacgtaaga

SEQ ID NO: 101 - DNA, 1378 bp, Faecalibacterium prausnitzii
  modified_base (16)..(16): a, c, t, g, unknown or other
  modified_base (33)..(34): a, c, t, g, unknown or other
  modified_base (37)..(37): a, c, t, g, unknown or other
  modified_base (649)..(649): a, c, t, g, unknown or other
tgcagtcgaacgagcnagaggagcttgcttctnngancgagtggcgaacgggtgagtaacgcgtgaggaacctgcctcaaagagggggacaacagttggaaacgactgctaataccgcataagcccacgggtcggcatcgaccagagggaaaaggagcaatccgctttgagatggcctcgcgtccgattagctagttggtgaggtaacggcccaccaaggcgacgatcggtagccggactgagaggttgaacggccacattgggactgagacacggcccagactcctacgggaggcagcagtggggaatattgcacaatgggggaaaccctgatgcagcgacgccgcgtggaggaagaaggtcttcggattgtaaactcctgttgttgaggaagataatgacggtactcaacaaggaagtgacggctaactacgtgccagcagccgcggtaaaacgtaggtcacaagcgttgtccggaattactgggtgtaaagggagcgcaggcgggaagacaagttggaagtgaaatccatgggctcaacccatgaactgctttcaaaactgtttttcttgagtagtgcagaggtaggcggaattcccggtgtagcggtggaatgcgtagatatcgggaggaacaccagtggcgaanggcggcctactgggcaccaactgacgctgaggctcgaaagtgtgggtagcaaacaggattagataccctggtagtccacaccgtaaacgatgattactaggtgttggaggattgaccccttcagtgccgcagttaacacaataagtaatccacctggggagtacgaccgcaaggttgaaactcaaaggaattgacgggggcccgcacaagcagtggagtatgtggtttaattcgacgcaacgcgaagaaccttaccaagtcttgacatcctgcgacggatatagaaatatgtctttccttcgggacgcagagacaggtggtgcatggttgtcgtcagctcgtgtcgtgagatgttgggttaagtcccgcaacgagcgcaacccttatggtcagttactacgcaagaggactctggccagactgccgttgacaaaacggaggaaggtggggatgacgtcaaatcatcatgccctttatgacttgggctacacacgtactacaatggcgttaaacaaagagaagcaagaccgcgaggtggagcaaaactcagaaacaacgtcccagttcggactgcaggctgcaactcgcctgcacgaagtcggaattgctagtaatcgtggatcagcatgccacggtgaatacgttcccgggccttgtacacaccgcccgtcacaccatgagagccggggggacccgaagtcggtagtctaaccgcaaggaggacgccgc

SEQ ID NO: 102 - DNA, 1408 bp, Clostridium fessum
  modified_base (3)..(3): a, c, t, g, unknown or other
  modified_base (5)..(5): a, c, t, g, unknown or other
  modified_base (22)..(22): a, c, t, g, unknown or other
  modified_base (53)..(54): a, c, t, g, unknown or other
acncntgcagtcgaacgaagcngatctagcggaagttttcggatggaagttannattgactgagtggcggacgggtgagtaacgcgtgggtaacctgcctcacactgggggacaacagttagaaatgactgctaataccgcataagcgcacaggaccgcatggtccggtgtgaaaaactccggtggtgtgagatggacccgcgtttgattagctagttggtggggtaacggcctaccaaggcgacgatcaatagccgacctgagagggtgaccggccacattgggactgagacacggcccaaactcctacgggaggcagcagtggggaatattgcacaatgggggaaaccctgatgcagcgacgccgcgtgagtgaagaagtatttcggtatgtaaagctctatcagcagggaagaaaatgacggtacctgactaagaagccccggctaactacgtgccagcagccgcggtaatacgtagggggcaagcgttatccggatttactgggtgtaaagggagcgtagacggtaaagcaagtctgaagtgaaagcccggggctcaaccccgggactgctttggaaactgtttaactagagtgctggagaggtaagcggaattcctagtgtagcggtgaaatgcgtagatattaggaggaacaccagtggcgaaggcggcttactggacagtaactgacgttgaggctcgaaagcgtggggagcaaacaggattagataccctggtagtccacgccgtaaacgatgaatactaggtgttgggggacaaagtccttcggtgccgtcgcaaacgcaataagtattccacctggggagtacgttcgcaagaatgaaactcaaaggaattgacggggacccgcacaagcggtggagcatgtggtttaattcgaagcaacgcgaagaaccttaccaaatcttgacatccctctgaccggcgagtaatgtcgcctttccttcgggacagaggagacaggtggtgcatggttgtcgtcagctcgtgtcgtgagatgttgggttaagtcccgcaacgagcgcaacccttatcctaagtagccagcagttcggctgggcactcttgggagactgccagggataacctggaggaaggtggggatgacgtcaaatcatcatgccccttatgatttgggctacacacgtgctacaatggcgtaaacaaagagaagcgagaccgcgaggtggagcaaatctcaaaaataacgtctcagttcggactgcaggctgcaactcgcctgcacgaagctggaatcgctagtaatcgcgaatcagaatgtcgcggtgaatacgttcccgggtcttgtacacaccgcccgtcacaccatgggagtcagtaatgcccgaagtcagtgacccaaccgtaaggagggagctgccga

SEQ ID NO: 103 - DNA, 1389 bp, Bacteroides massiliensis
gtcgaggggcagcatggtcttagcttgctaaggccgatggcgaccggcgcacgggtgagtaacgcgtatccaacctgccttacactcttggacagccttctgaaagggagattaatacaagatgttatcatgagtaagcattttcgcatgattaaaggtttaccggtgtaagatggggatgcgttccattagatagtaggcggggtaacggcccacctagtcttcgatggataggggttctgagaggaaggtcccccacattggaactgagacacggtccaaactcctacgggaggcagcagtgaggaatattggtcaatggacgagagtctgaaccagccaagtagcgtgaaggatgaaggttctatggattgtaaacttcttttatacgggaataaacggatccacgtgtggatttttgcatgtaccgtatgaataaggatcggctaactccgtgccagcagccgcggtaatacggaggatccgagcgttatccggatttattgggtttaaagggagcgtagatgggttgttaagtcagttgtgaaagtttgcggctcaaccgtaaaattgcaattgatactggcagtcttgagtacagttgaggtaggcggaattcgtggtgtagcggtgaaatgcttagatatcacgaagaactccgattgcgaaggcagcttactaacctgtaactgacattgatgctcgaaagtgtgggtatcaaacaggattagataccctggtagtccacacggtaaacgatgaatactcgctgtaggcgatatacagtctgcggccaagcgaaagcattaagtattccacctggggagtacgccggcaacggtgaaactcaaaggaattgacgggggcccgcacaagcggaggaacatgtggtttaattcgatgatacgcgaggaaccttacccgggcttaaattgcaaccgaatatggcggaaacgctatagctagcaatagcggttgtgaaggtgctgcatggttgtcgtcagctcgtgccgtgaggtgtcggcttaagtgccataacgagcgcaacccttgccgatagttactaacaggttatgctgaggactctgtcgggactgccatcgtaagatgtgaggaaggtggggatgacgtcaaatcagcacggcccttacgtccggggctacacacgtgttacaatggggggtacagagggctgctaccacgcaagtggatgccaatcccaaaaacctctctcagttcggattgaagtctgcaacccgacttcatgaagctggattcgctagtaatcgcgcatcagccacggcgcggtgaatacgttcccgggccttgtacacaccgcccgtcaagccatgggagccgggggtacctgaagtgcgtaaccgcaaggag

SEQ ID NO: 104 - DNA, 1390 bp, Blautia wexlerae
  modified_base (8)..(11): a, c, t, g, unknown or other
  modified_base (769)..(770): a, c, t, g, unknown or other
  modified_base (773)..(775): a, c, t, g, unknown or other
tgcagtcnnnnggaattatcttattgaaacttcggtcgatttaatttaattctagtggcggacgggtgagtaacgcgtgggtaacctgccttatacagggggataacagtcagaaatgactgctaataccgcataagcgcacagagctgcatggctcagtgtgaaaaactccggtggtataagatggacccgcgttggattagcttgttggtggggtaacggcccaccaaggcgacgatccatagccggcctgagagggtgaacggccacattgggactgagacacggcccagactcctacgggaggcagcagtggggaatattgcacaatgggggaaaccctgatgcagcgacgccgcgtgaaggaagaagtatctcggtatgtaaacttctatcagcagggaagataatgacggtacctgactaagaagccccggctaactacgtgccagcagccgcggtaatacgtagggggcaagcgttatccggatttactgggtgtaaagggagcgtagacggtgtggcaagtctgatgtgaaaggcatgggctcaacccgtggactgcattggaaactgtcatacttgagtgccggaggggtaagcggaattcctagtgtagcggtgaaatgcgtagatattaggaggaacaccagtggcgaaggcggcttactggacggtaactgacgttgaggctcgaaagcgtggggagcaaacaggattagataccctggtagtccacgccgtaaacgatgaatactaggtgtcgggnngcnnnctttcggtgccgtcgcaaacgcaataagtattccacctggggagtacgttcgcaagaatgaaactcaaaggaattgacggggacccgcacaagcggtggagcatgtggtttaattcgaagcaacgcgaagaaccttaccaagtcttgacatccccctgaccggaacttaaccgttcctttccttcgggacaggggagacaggtggtgcatggttgtcgtcagctcgtgtcgtgagatgttgggttaagtcccgcaacgagcgcaacccctatcctcagtagccagcagttcggctgggcactctgtggagactgccagggataacctggaggaaggcggggatgacgtcaaatcatcatgccccttatgatttgggctacacacgtgctacaatggcgtaaacaaagggaagcaagcctgtgaaggtaagcaaatcccaaaaataacgtcccagttcggactgcagtctgcaactcgactgcacgaagctggaatcgctagtaatcgcggatcagaatgccgcggtgaatacgttcccgggtcttgtacacaccgcccgtcacaccatgggagtcagtaacgcccgaagtcagtgacctaaccgcaagggaggag

SEQ ID NO: 105 - DNA, 1394 bp, Unknown
  Description of Unknown: Ruminococcaceae sp. FBI00105 FBI00160 sequence
  modified_base (15)..(15): a, c, t, g, unknown or other
  modified_base (1392)..(1392): a, c, t, g, unknown or other
tcgaacggaacgccnaggaaagagttttcggacaatggaattggttgtttagtggcggacgggtgagtaacgcgtgagtaacctgccttggagtggggaataacacagtgaaaactgtgctaataccgcatgatatattggtgtcgcatggcactgatatcaaagatttatcgctctgagatggactcgcgtctgattagatagttggcggggtaacggcccaccaagtcgacgatcagtagccggactgagaggttggccggccacattgggactgagacacggcccagactcctacgggaggcagcagtggggaatattgggcaatgggcgcaagcctgacccagcaacgccgcgtgaaggaagaaggctttcgggttgtaaacttcttttaacagggacgaagtaagtgacggtacctgttgaataagccacggctaactacgtgccagcagccgcggtaatacgtaggtggcaagcgttatccggatttactgggtgtaaagggcgtgtaggcgggactgcaagtcagatgtgaaaactatgggctcaacccatagcctgcatttgaaactgtagttcttgagtgtcggagaggcaatcggaattccgtgtgtagcggtgaaatgcgtagatatacggaggaacaccagtggcgaaggcggattgctggacgatgactgacgctgaggcgcgaaagcgtggggagcaaacaggattagataccctggtagtccacgccgtaaacgatggatactaggtgtggggggtctgaccccctccgtgccgcagctaacgcaataagtatcccacctggggagtacgatcgcaaggttgaaactcaaaggaattgacgggggcccgcacaagcggtggagtatgtggtttaattcgaagcaacgcgaagaaccttaccagggcttgacatcctactaacgaaccagagatggattaggtgcccttcggggaaagtagagacaggtggtgcatggttgtcgtcagctcgtgtcgtgagatgttgggttaagtcccgcaacgagcgcaacccttattgttagttgctacgcaagagcactctagcgagactgccgttgacaaaacggaggaaggtggggacgacgtcaaatcatcatgccccttatgtcctgggccacacacgtactacaatggcggttaacagagggaggcaaagccgcgaggcagagcaaacccctaaaagccgtcccagttcggattgcaggctgaaacccgcctgtatgaagtcggaatcgctagtaatcgcggatcagcatgccgcggtgaatacgttcccgggccttgtacacaccgcccgtcacaccatgagagtcgggaacacccgaagtccgtagcctaactgcaaagggggcgcgncc

SEQ ID NO: 106 - DNA, 1261 bp, Enterococcus durans
gcagtcgtacgcttctttttcaccggagcttgctccaccggaaaaagaagagtggcgaacgggtgagtaacacgtgggtaacctgcccatcagaaggggataacacttggaaacaggtgctaataccgtataacaatcgaaaccgcatggttttgatttgaaaggcgctttcgggtgtcgctgatggatggacccgcggtgcattagctagttggtgaggtaacggctcaccaaggccacgatgcatagccgacctgagagggtgatcggccacattgggactgagacacggcccaaactcctacgggaggcagcagtagggaatcttcggcaatggacgaaagtctgaccgagcaacgccgcgtgagtgaagaaggttttcggatcgtaaaactctgttgttagagaagaacaaggatgagagtaactgttcatcccttgacggtatctaaccagaaagccacggctaactacgtgccagcagccgcggtaatacgtaggtggcaagcgttgtccggatttattgggcgtaaagcgagcgcaggcggtttcttaagtctgatgtgaaagcccccggctcaaccggggagggtcattggaatactgggagacttgagtgcagaagaggagagtggaattccatgtgtagcggtgaaatgcgtagatatatggaggaacaccagtggcgaaggcggctctctggtctgtaactgacgctgaggctcgaaagcgtggggagcaaacaggattagataccctggtagtccacgccgtaaacgatgaatgctaagtgttggaaggttttccccctttcgtgctgcagctaaccgctttagcccttcgcctggggggtacgacccccagggttaaaattcaaaggattgaagggggcccgcaccaaccgggggaccatgtggtttaattggaaccaacggaaagaacccttaccaggtctggccttctttgaaccactcaaaagaaagagcttccccttcgggggcaaagtgacaggtggtgcatggttgtggtcagctcgtgtcttgagatgttgggttaagtcccgcaacgagcgcaacccttattgttagttgccatcattcagttgggcactctagcaagactgccggtgacaaaccggaggaaggtggggatgacgtcaaatcatcatgccccttatgacctgggctacacacgtgctacaatgggaagtacaacgagttgcgaagtcgcgaggctaagctaatctcttaaagcttctctc

SEQ ID NO: 107 - DNA, 1284 bp, Enterococcus durans
  modified_base (1047)..(1048): a, c, t, g, unknown or other
  modified_base (1282)..(1282): a, c, t, g, unknown or other
tgcagtcgtacgcttctttttccaccggagcttgctccaccggaaaaagaagagtggcgaacgggtgagtaacacgtgggtaacctgcccatcagaaggggataacacttggaaacaggtgctaataccgtataacaatcgaaaccgcatggttttgatttgaaaggcgctttcgggtgtcgctgatggatggacccgcggtgcattagctagttggtgaggtaacggctcaccaaggccacgatgcatagccgacctgagagggtgatcggccacattgggactgagacacggcccaaactcctacgggaggcagcagtagggaatcttcggcaatggacgaaagtctgaccgagcaacgccgcgtgagtgaagaaggttttcggatcgtaaaactctgttgttagagaagaacaaggatgagagtaactgttcatcccttgacggtatctaaccagaaagccacggctaactacgtgccagcagccgcggtaatacgtaggtggcaagcgttgtccggatttattgggcgtaaagcgagcgcaggcggtttcttaagtctgatgtgaaagcccccggctcaaccggggagggtcattggaaactgggagacttgagtgcagaagaggagagtggaattccatgtgtagcggtgaaatgcgtagatatatggaggaacaccagtggcgaagcggctctctggtctgtaactgacgctgaggctcgaaagcgtggggagcaaacaggattagataccctggtagtccacgccgtaaacgatgagtgctaagtgttggagggtttccgcccttcagtgctgcagctaacgcattaagcactccgcctggggagtacgaccgcaaggttgaaactcaaaggaattgacgggggcccgcacaagcggtggagcatgtggtttaattcgaagcaacgcgaagaaccttaccaggtcttgacatcctttgaccactctagagatagagcttccccttcgggggcaaagtgacaggtggtgcatggtatcgtcagctcgtgtcttgagatgtnnggttaagtcccgcaacgagcgcaacccttattgttagttgccatcattcagttgggcactctagcaagacagccggtgacaaaccggaggaaggtggggatgacgtcaaatcatcatgcccattatgacctgggttacacacatgctacaatgggaagtacaacgagttgtgaagtcgcgaggctaagctaatctcttaaagcttctctcagttcggattgcaggctgcaactngc

SEQ ID NO: 108 - DNA, 1380 bp, Unknown
  Description of Unknown: Ruminococcaceae sp. FBI00108 sequence
  modified_base (650)..(650): a, c, t, g, unknown or other
tgcagtcgaacggagcttagagagcttgctttttaagcttagtggcgaacgggtgagtaacgcgtgagtaacctgccctagagtgggggacaacagttggaaacgactgctaataccgcataagcccacggtgccgcatgacactgagggaaaaggatttattcgctttaggatggactcgcgtccaattagctagttggtgaggtaacggcccaccaaggcgacgattggtagccggactgagaggttgaacggccacattgggactgagacacggcccagactcctacgggaggcagcagtgggggatattgcacaatgggggaaaccctgatgcagcgacgccgcgtggaggaagaaggttttcggattgtaaactcctgtcgttagggacgataatgacggtacctaacaagaaagcaccggctaactacgtgccagcagccgcggtaaaacgtagggtgcaagcgttgtccggaattactgggtgtaaagggagcgcaggcgggaagacaagttggaagtgaaaaccatgggctcaacccatgaattgctttcaaaactgtttttcttgagtagtgcagaggtagatggaattcccggtgtagcggtggaatgcgtagatatcgggaggaacaccagtggcgaanggcggtctactgggcaccaactgacgctgaggctcgaaagcatgggtagcaaacaggattagataccctggtagtccatgccgtaaacgatgattactaggtgttggggggattgaccccctcagtgccgcagttaacacaataagtaatccacctggggagtacgaccgcaaggttgaaactcaaaggaattgacgggggcccgcacaagcagtggagtatgtggtttaattcgaagcaacgcgaagaaccttaccaggtcttgacatccgatgcatagcacagagatgtgtgaaatccttcgggacatcgagacaggtggtgcatggttgtcgtcagctcgtgtcgtgagatgttgggttaagtcccgcaacgagcgcaacccttattgccagttactacgttaagaggactctggcgagactgccgttgacaaaacggaggaaggtggggatgacgtcaaatcatcatgccctttatgacctgggctacacacgtactacaatggcgttaaacaaagagaagcaagaccgcgaggtggagcaaaactcaaaaacaacgtctcagttcagattgcaggctgcaactcgcctgcatgaagtcggaattgctagtaatcgcggatcagcatgccgcggtgaatacgttcccgggccttgtacacaccgcccgtcacaccatgagagccggggggacccgaagtcgatagtctaaccgcaaggaggacgtc

SEQ ID NO: 109 - DNA, 1177 bp, Coprococcus comes
  modified_base (21)..(25): a, c, t, g, unknown or other
  modified_base (41)..(41): a, c, t, g, unknown or other
  modified_base (43)..(46): a, c, t, g, unknown or other
  modified_base (663)..(663): a, c, t, g, unknown or other
  modified_base (1130)..(1130): a, c, t, g, unknown or other
  modified_base (1142)..(1142): a, c, t, g, unknown or other
tgcagtcgaacgaagcacttnnnnntgattcttcggatgangnnnnttgtgactgagtggcggacgggtgagtaacgcgtgggtaacctgcctcatacagggggataacagttagaaatgactgctaataccgcataagaccacggagccgcatggctcggtgggaaaaactccggtggtatgagatggacccgcgtctgattaggtagttggtggggtaacggcctaccaagccaacgatcagtagccgacctgagagggtgaccggccacattgggactgagacacggcccaaactcctacgggaggcagcagtggggaatattgcacaatgggggaaaccctgatgcagcgacgccgcgtgagcgaagaagtatttcggtatgtaaagctctatcagcagggaagaaaatgacggtacctgactaagaagcaccggctaaatacgtgccagcagccgcggtaatacgtatggtgcaagcgttatccggatttactgggtgtaaagggagcgtagacggctgtgtaagtctgaagtgaaagcccggggctcaaccccgggactgctttggaaactatgcagctagagtgtcggagaggtaagtggaattcccagtgtagcggtgaaatgcgtagatattgggaggaacaccagtggcgaanggcggcttactggacgatgactgacgttgaggctcgaaagcgtggggagcaaacaggattagataccctggtagtccacgccgtaaacgatgactactaggtgtcggggagcaaagctcttcggtgccgcagcaaacgcaataagtagtccacctggggagtacgttcgcaagaatgaaactcaaaggaattgacggggacccgcacaagcggtggagcatgtggtttaattcgaagcaacgcgaagaaccttacctgctcttgacatcccggtgaccggcatgtaatgatgccttttcttcggaacaccggtgacaggtggtgcatggttgtcgtcagctcgtgtcgtgagatgttgggttaagtcccgcaacgagcgcaacccttatcttcagtagccagcattttggatgggcactctggagagactgccagggataacctggaggaaggtggggatgacgtcnaatcatcatgcnccttatgagcagggctacacacgtgctacaatggc

SEQ ID NO: 110 - DNA, 1386 bp, Unknown
  Description of Unknown: Lachnoclostridium pacaense sequence
  modified_base (27)..(27): a, c, t, g, unknown or other
  modified_base (428)..(428): a, c, t, g, unknown or other
  modified_base (1379)..(1379): a, c, t, g, unknown or other
tgcagtcgaacgaagcatctataggangttttcggatggaatatgggatgactgagtggcggacgggtgagtaacgcgtggataacctgcctcacactgggggataacagttagaaatggctgctaataccgcaaaagcgcacagtaccgcagggtacggtgtgaaaaacccaggtggtgtgagatggatccgcgtctgattagccagttggcggggtaacggcccaccaaagcgactatagtagccgacctgagagggtgaccggccacattgggactgagacacggcccaaactcctacgggaggcagcagtggggaatattgcacaatgggcgaaagcctgatgcagcgaccccgcgtgagtgaagaagtatctcggtatgtaaagctctatcagcagggaagaaaatgacggtacctgactaanaagccccggctaactacgtgccagcagccgcggtaatacgtagggggcaagcgttatccggatttactgggtgtaaagggagcgtagacggcgatgcaagtctgaagtgaaagcccggggctcaaccccgggactgctttggaaactgtgtggctggagtgcaggagaggtaagtggaattcctagtgtagcggtgaaatgcgtagatattaggaggaacaccagtggcgaaggcggcttactggactgtaactgacgttgaggctcgaaagcgtggggagcaaacaggattagataccctggtagtccacgccgtaaacgatgaatgctaggtgtcggggggcaaagcccctcggtgccgccgctaacgcaataagcattccacctggggagtacgttcgcaagaatgaaactcaaaggaattgacggggacccgcacaagcggtggagcatgtggtttaattcgaagcaacgcgaagaaccttaccaagtcttgacatccccctgaccggacagtaacgtgtcccttccttcgggacaggggagacaggtggtgcatggttgtcgtcagctcgtgtcgtgagatgttgggttaagtcccgcaacgagcgcaacccttatccttagtagccagcatttcgggtgggcactctagggagactgccagggataacctggaggaaggtggggatgacgtcaaatcatcatgccccttatgatttgggctacacacgtgctacaatggcgtaaacaaagggaagcggccctgcgaaggtgagcaaatcccaaaaataacgtcccagttcggactgtagtctgcaacccgactacacgaagctggaatcgctagtaatcgcggatcagaatgccgcggtgaatacgttcccgggtcttgtacacaccgcccgtcacaccatgggagtcagcaacgcccgaagtcagtgacccaancgaaagg

SEQ ID NO: 111 - DNA, 1395 bp, Bacteroides vulgatus
  modified_base (1394)..(1394): a, c, t, g, unknown or other
tgcagtcgaggggcagcatggtcttagcttgctaaggccgatggcgaccggcgcacgggtgagtaacacgtatccaacctgccgtctactcttggacagccttctgaaaggaagattaatacaagatggcatcatgagtccacatgttcacatgattaaaggtattccggtagacgatggggatgcgttccattagatagtaggcggggtaacggcccacctagtcttcgatggataggggttctgagaggaaggtcccccacattggaactgagacacggtccaaactcctacgggaggcagcagtgaggaatattggtcaatgggcgcaggcctgaaccagccaagtagcgtgaaggatgactgccctatgggttgtaaacttcttttataaaggaataaagtcgggtatgcatacccgtttgcatgtactttatgaataaggatcggctaactccgtgccagcagccgcggtaatacggaggatccgagcgttatccggatttattgggtttaaagggagcgtagatggatgtttaagtcagttgtgaaagtttgcggctcaaccgtaaaattgcagttgatactggatatcttgagtgcagttgaggcaggcggaatttcgtggtgtagcggtgaaatgcttagatatcacgaagaactccgattgcgaaggcagcctgctaagctgcaactgacattgaggctcgaaagtgtgggtatcaaacaggattagataccctggtagtccacacggtaaacgatgaatactcgctgtttgcgatatacagcaagcggccaagcgaaagcgttaagtattccacctggggagtacgccggcaacggtgaaactcaaaggaattgacgggggcccgcacaagcggaggaacatgtggtttaattcgatgatacgcgaggaaccttacccgggcttaaattgcagatgaattacggtgaaagccgtaagccgcaaggcatctgtgaaggtgctgcatggttgtcgtcagctcgtgccgtgaggtgtcggcttaagtgccataacgagcgcaacccttgttgtcagttactaacaggttccgctgaggactctgacaagactgccatcgtaagatgtgaggaaggtggggatgacgtcaaatcagcacggcccttacgtccggggctacacacgtgttacaatggggggtacagagggccgctaccacgcgagtggatgccaatcccaaaaacctctctcagttcggactggagtctgcaacccgactccacgaagctggattcgctagtaatcgcgcatcagccacggcgcggtgaatacgttcccgggccttgtacacaccgcccgtcaagccatgggagccgggggtacctgaagtgcgtaaccgcgaggagcnc

SEQ ID NO: 112 - DNA, 1399 bp, Bacteroides uniformis
  modified_base (2)..(3): a, c, t, g, unknown or other
  modified_base (5)..(5): a, c, t, g, unknown or other
  modified_base (1373)..(1377): a, c, t, g, unknown or other
  modified_base (1382)..(1383): a, c, t, g, unknown or other
  modified_base (1385)..(1386): a, c, t, g, unknown or other
  modified_base (1398)..(1398): a, c, t, g, unknown or other
anncntgcagtcgaggggcagcatgaacttagcttgctaagtttgatggcgaccggcgcacgggtgagtaacacgtatccaacctgccgatgactcggggatagcctttcgaaagaaagattaatacccgatggcatagttcttccgcatggtagaactattaaagaatttcggtcatcgatggggatgcgttccattaggttgttggcggggtaacggcccaccaagccttcgatggataggggttctgagaggaaggtcccccacattggaactgagacacggtccaaactcctacgggaggcagcagtgaggaatattggtcaatggacgagagtctgaaccagccaagtagcgtgaaggatgactgccctatgggttgtaaacttcttttatacgggaataaagtgaggcacgtgtgcctttttgtatgtaccgtatgaataaggatcggctaactccgtgccagcagccgcggtaatacggaggatccgagcgttatccggatttattgggtttaaagggagcgtaggcggacgcttaagtcagttgtgaaagtttgcggctcaaccgtaaaattgcagttgatactgggtgtcttgagtacagtagaggcaggcggaattcgtggtgtagcggtgaaatgcttagatatcacgaagaactccgattgcgaaggcagcttgctggactgtaactgacgctgatgctcgaaagtgtgggtatcaaacaggattagataccctggtagtccacacagtaaacgatgaatactcgctgtttgcgatatacagtaagcggccaagcgaaagcgttaagtattccacctggggagtacgccggcaacggtgaaactcaaaggaattgacgggggcccgcacaagcggaggaacatgtggtttaattcgatgatacgcgaggaaccttacccgggcttgaattgcaactgaatgatgtggagacatgtcagccgcaaggcagttgtgaaggtgctgcatggttgtcgtcagctcgtgccgtgaggtgtcggcttaagtgccataacgagcgcaacccttatcgatagttaccatcaggttatgctggggactctgtcgagactgccgtcgtaagatgtgaggaaggtggggatgacgtcaaatcagcacggcccttacgtccggggctacacacgtgttacaatggggggtacagaaggcagctacacggtgacgtgatgctaatcccgaaagcctctctcagttcggattggagtctgcaacccgactccatgaagctggattcgctagtaatcgcgcatcagccacggcgcggtgaatacgttcccgggccttgtacacaccgcccgtcaagccatgaaagccgggggtacnnnnnagtgnntnnccgcaaggagcnc

SEQ ID NO: 113 - DNA, 1395 bp, Parabacteroides merdae
tgcagtcgaggggcagcatgatttgtagcaatacagattgatggcgaccggcgcacgggtgagtaacgcgtatgcaacttacctatcagagggggatagcccggcgaaagtcggattaataccccataaaacaggggtcccgcatgggaatatttgttaaagattcatcgctgatagataggcatgcgttccattaggcagttggcggggtaacggcccaccaaaccgacgatggataggggttctgagaggaaggtcccccacattggtactgagacacggaccaaactcctacgggaggcagcagtgaggaatattggtcaatggccgagaggctgaaccagccaagtcgcgtgaaggaagaaggatctatggtttgtaaacttcttttataggggaataaagtggaggacgtgtccttttttgtatgtaccctatgaataagcatcggctaactccgtgccagcagccgcggtaatacggaggatgcgagcgttatccggatttattgggtttaaagggtgcgtaggtggtgatttaagtcagcggtgaaagtttgtggctcaaccataaaattgccgttgaaactgggttacttgagtgtgtttgaggtaggcggaatgcgtggtgtagcggtgaaatgcatagatatcacgcagaactccgattgcgaaggcagcttactaaaccataactgacactgaagcacgaaagcgtggggatcaaacaggattagataccctggtagtccacgcagtaaacgatgattactaggagtttgcgatacaatgtaagctctacagcgaaagcgttaagtaatccacctggggagtacgccggcaacggtgaaactcaaaggaattgacgggggcccgcacaagcggaggaacatgtggtttaattcgatgatacgcgaggaaccttacccgggtttgaacgtagtctgaccggagtggaaacactctttctagcaatagcagattacgaggtgctgcatggttgtcgtcagctcgtgccgtgaggtgtcggcttaagtgccataacgagcgcaacccttatcactagttactaacaggtgaagctgaggactctggtgagactgccagcgtaagctgtgaggaaggtggggatgacgtcaaatcagcacggcccttacatccggggcgacacacgtgttacaatggcatggacaaagggcagctacctggtgacaggatgctaatctccaaaccatgtctcagttcggatcggagtctgcaactcgactccgtgaagctggattcgctagtaatcgcgcatcagccatggcgcggtgaatacgttcccgggccttgtacacaccgcccgtcaagccatgggagccgggggtacctgaagtccgtaaccgcaaggatc

SEQ ID NO: 114 - DNA, 1384 bp, Dorea formicigenerans
  modified_base (37)..(37): a, c, t, g, unknown or other
  modified_base (1374)..(1375): a, c, t, g, unknown or other
  modified_base (1378)..(1378): a, c, t, g, unknown or other
tcgagcgaagcacttaagttcgattcttcggatgaangacttttgtgactgagcggcggacgggtgagtaacgcgtgggtaacctgcctcatacagggggataacagttagaaatggctgctaataccgcataagaccacagtactgcatggtacagtggtaaaaactccggtggtatgagatggacccgcgtctgattaggtagttggtgaggtaacggcccaccaagccgacgatcagtagccgacctgagagggtgaccggccacattgggactgagacacggcccagactcctacgggaggcagcagtggggaatattgcacaatgggcgaaagcctgatgcagcgacgccgcgtgaaggatgaagtatttcggtatgtaaacttctatcagcagggaagaaaatgacggtacctgactaagaagccccggctaactacgtgccagcagccgcggtaatacgtagggggcaagcgttatccggatttactgggtgtaaagggagcgtagacggctgtgcaagtctgaagtgaaaggcatgggctcaacctgtggactgctttggaaactgtgcagctagagtgtcggagaggtaagtggaattcctagtgtagcggtgaaatgcgtagatattaggaggaacaccagtggcgaaggcggcttactggacgatgactgacgttgaggctcgaaagcgtggggagcaaacaggattagataccctggtagtccacgccgtaaacgatgactgctaggtgtcgggtagcaaagctattcggtgccgcagctaacgcaataagcagtccacctggggagtacgttcgcaagaatgaaactcaaaggaattgacggggacccgcacaagcggtggagcatgtggtttaattcgaagcaacgcgaagaaccttacctgatcttgacatcccgatgaccgcttcgtaatggaagtttttcttcggaacatcggtgacaggtggtgcatggttgtcgtcagctcgtgtcgtgagatgttgggttaagtcccgcaacgagcgcaacccttatcttcagtagccagcatttaagatgggcactctggagagactgccagggataacctggaggaaggtggggatgacgtcaaatcatcatgccccttatgaccagggctacacacgtgctacaatggcgtaaacaaagggaagcagagccgcgaggccgagcaaatctcaaaaataacgtctcagttcggattgtagtctgcaactcgactacatgaagctggaatcgctagtaatcgcagatcagaatgctgcggtgaatacgttcccgggtcttgtacacaccgcccgtcacaccatgggagtcagtaacgcccgaagtcagtgaccnnaancgaaag

SEQ ID NO: 115 - DNA, 1387 bp, Dorea formicigenerans
  modified_base (1382)..(1382): a, c, t, g, unknown or other
tgcagtcgagcgaagcacttaagttcgattcttcggatgaagacttttgtgactgagcggcggacgggtgagtaacgcgtgggtaacctgcctcatacagggggataacagttagaaatggctgctaataccgcataagaccacagtactgcatggtacagtggtaaaaactccggtggtatgagatggacccgcgtctgattaggtagttggtgaggtaacggcccaccaagccgacgatcagtagccgacctgagagggtgaccggccacattgggactgagacacggcccagactcctacgggaggcagcagtggggaatattgcacaatgggcgaaagcctgatgcagcgacgccgcgtgaaggatgaagtatttcggtatgtaaacttctatcagcagggaagaaaatgacggtacctgactaagaagccccggctaactacgtgccagcagccgcggtaatacgtagggggcaagcgttatccggatttactgggtgtaaagggagcgtagacggctgtgcaagtctgaagtgaaaggcatgggctcaacctgtggactgctttggaaactgtgcagctagagtgtcggagaggtaagtggaattcctagtgtagcggtgaaatgcgtagatattaggaggaacaccagtggcgaaggcggcttactggacgatgactgacgttgaggctcgaaagcgtggggagcaaacaggattagataccctggtagtccacgccgtaaacgatgactgctaggtgtcgggtagcaaagctattcggtgccgcagctaacgcaataagcagtccacctggggagtacgttcgcaagaatgaaactcaaaggaattgacggggacccgcacaagcggtggagcatgtggtttaattcgaagcaacgcgaagaaccttacctgatcttgacatcccgatgaccgcttcgtaatggaagtttttcttcggaacatcggtgacaggtggtgcatggttgtcgtcagctcgtgtcgtgagatgttgggttaagtcccgcaacgagcgcaacccttatcttcagtagccagcatttaagatgggcactctggagagactgccagggataacctggaggaaggtggggatgacgtcaaatcatcatgccccttatgaccagggctacacacgtgctacaatggcgtaaacaaagggaagcagagccgcgaggccgagcaaatctcaaaaataacgtctcagttcggattgtagtctgcaactcgactacatgaagctggaatcgctagtaatcgcagatcagaatgctgcggtgaatacgttcccgggtcttgtacacaccgcccgtcacaccatgggagtcagtaacgcccgaagtcagtgacccaacncgaaa

SEQ ID NO: 116 - DNA, 1393 bp, Ruminococcus faecis
  modified_base (10)..(10): a, c, t, g, unknown or other
  modified_base (1389)..(1391): a, c, t, g, unknown or other
tgcagtcgancgaagcaccttgatttgattcttcggatgaagatcctggtgactgagtggcggacgggtgagtaacgcgtgggtaacctgcctcatacagggggataacagttagaaatgactgctaataccgcataagaccacagcaccgcatggtgcaggggtaaaaactccggtggtatgagatggacccgcgtctgattaggtagttggtggggtaacggcctaccaagccgacgatcagtagccgacctgagagggtgaccggccacattgggactgagacacggcccaaactcctacgggaggcagcagtggggaatattgcacaatgggggaaaccctgatgcagcgacgccgcgtgagcgatgaagtatttcggtatgtaaagctctatcagcagggaagaaaatgacggtacctgactaagaagcaccggctaaatacgtgccagcagccgcggtaatacgtatggtgcaagcgttatccggatttactgggtgtaaagggagcgtagacggagtggcaagtctgatgtgaaaacccggggctcaaccccgggactgcattggaaactgtcaatctggagtaccggagaggtaagcggaattcctagtgtagcggtgaaatgcgtagatattaggaggaacaccagtggcgaaggcggcttactggacggtaactgacgttgaggctcgaaagcgtggggagcaaacaggattagataccctggtagtccacgccgtaaacgatgactactaggtgtcgggcagcaaagctgttcggtgccgcagcaaacgcaataagtagtccacctggggagtacgttcgcaagaatgaaactcaaaggaattgacggggacccgcacaagcggtggagcatgtggtttaattcgaagcaacgcgaagaaccttacctgctcttgacatctccctgaccggcaagtaatgttgcctttccttcgggacagggatgacaggtggtgcatggttgtcgtcagctcgtgtcgtgagatgttgggttaagtcccgcaacgagcgcaacccctatctttagtagccagcggtcaggccgggcactctagagagactgccagggataacctggaggaaggtggggatgacgtcaaatcatcatgccccttatgagcagggctacacacgtgctacaatggcgtaaacaaagggaggcagaaccgcgaggtcgagcaaatcccaaaaataacgtctcagttcggattgtagtctgcaactcgactacatgaagctggaatcgctagtaatcgcgaatcagaatgtcgcggtgaatacgttcccgggtcttgtacacaccgcccgtcacaccatgggagtcagtaacgcccgaagtcagtgacccaaccgtaaggnnnag

SEQ ID NO: 117 - DNA, 1393 bp, Blautia faecis
  modified_base (2)..(3): a, c, t, g, unknown or other
  modified_base (5)..(5): a, c, t, g, unknown or other
  modified_base (22)..(24): a, c, t, g, unknown or other
  modified_base (27)..(27): a, c, t, g, unknown or other
  modified_base (33)..(34): a, c, t, g, unknown or other
  modified_base (42)..(44): a, c, t, g, unknown or other
  modified_base (52)..(53): a, c, t, g, unknown or other
  modified_base (1388)..(1389): a, c, t, g, unknown or other
anncntgcagtcgaacgggaannnttnattganngcttcggnnngatttagnntctagtttctagtggcggacgggtgagtaacgcgtgggtaacctgccttatactgggggataacagccagaaatgactgctaataccgcataagcgcacagaaccgcatggttcggtgtgaaaaactccggtggtataagatggacccgcgttggattagctagttggcagggcagcggcctaccaaggcgacgatccatagccggcctgagagggtgaacggccacattgggactgagacacggcccagactcctacgggaggcagcagtggggaatattgcacaatgggggaaaccctgatgcagcgacgccgcgtgaaggaagaagtatctcggtatgtaaacttctatcagcagggaagataatgacggtacctgactaagaagccccggctaactacgtgccagcagccgcggtaatacgtagggggcaagcgttatccggatttactgggtgtaaagggagcgtagacggcgcagcaagtctgatgtgaaaggcaggggcttaacccctggactgcattggaaactgctgtgcttgagtgccggaggggtaagcggaattcctagtgtagcggtgaaatgcgtagatattaggaggaacaccagtggcgaaggcggcttactggacggtaactgacgttgaggctcgaaagcgtggggagcaaacaggattagataccctggtagtccacgccgtaaacgatgaatactaggtgtcagggagcacagctctttggtgccgccgcaaacgcattaagtattccacctggggagtacgttcgcaagaatgaaactcaaaggaattgacggggacccgcacaagcggtggagcatgtggtttaattcgaagcaacgcgaagaaccttaccaaatcttgacatccctctgaccgggacttaaccgtccctttccttcgggacaggggagcaggtgggcatggttgtcgtcagctcgtgtcgtgagatgttgggttaagtcccgcaacgagcgcaacccctatccttagtagccagcacgtaatggtgggcactctgaggagactgccagggataacctggaggaaggcggggatgacgtcaaatcatcatgccccttatgatttgggctacacacgtgctacaatggcgtaaacaaagggaagcgaacctgtgagggtgggcaaatctcaaaaataacgtcccagttcggactgcagtctgcaactcgactgcacgaagctggaatcgctagtaatcgcggatcagaatgccgcggtgaatacgttcccgggtcttgtacacaccgcccgtcacaccatgggagtcagtaacgcccgaagtcagtgacctaanngcaa

SEQ ID NO: 118 - DNA, 1406 bp, Blautia faecis
  modified_base (2)..(3): a, c, t, g, unknown or other
  modified_base (5)..(5): a, c, t, g, unknown or other
  modified_base (22)..(22): a, c, t, g, unknown or other
  modified_base (24)..(24): a, c, t, g, unknown or other
  modified_base (27)..(27): a, c, t, g, unknown or other
  modified_base (34)..(34): a, c, t, g, unknown or other
  modified_base (42)..(42): a, c, t, g, unknown or other
  modified_base (54)..(54): a, c, t, g, unknown or other
  modified_base (58)..(58): a, c, t, g, unknown or other
  modified_base (1395)..(1395): a, c, t, g, unknown or other
  modified_base (1404)..(1405): a, c, t, g, unknown or other
anncntgcagtcgaacgggaananttnattgaangcttcggnggatttagattntagnttctagtggcggacgggtgagtaacgcgtgggtaacctgccttatactgggggataacagccagaaatgactgctaataccgcataagcgcacagaaccgcatggttcggtgtgaaaaactccggtggtataagatggacccgcgttggattagctagttggcagggcagcggcctaccaaggcgacgatccatagccggcctgagagggtgaacggccacattgggactgagacacggcccagactcctacgggaggcagcagtggggaatattgcacaatgggggaaaccctgatgcagcgacgccgcgtgaaggaagaagtatctcggtatgtaaacttctatcagcagggaagataatgacggtacctgactaagaagccccggctaactacgtgccagcagccgcggtaatacgtagggggcaagcgttatccggatttactgggtgtaaagggagcgtagacggcgcagcaagtctgatgtgaaaggcaggggcttaacccctggactgcattggaaactgctgtgcttgagtgccggaggggtaagcggaattcctagtgtagcggtgaaatgcgtagatattaggaggaacaccagtggcgaaggcggcttactggacggtaactgacgttgaggctcgaaagcgtggggagcaaacaggattagataccctggtagtccacgccgtaaacgatgaatactaggtgtcagggagcacagctctttggtgccgccgcaaacgcattaagtattccacctggggagtacgttcgcaagaatgaaactcaaaggaattgacggggacccgcacaagcggtggagcatgtggtttaattcgaagcaacgcgaagaaccttaccaaatcttgacatccctctgaccgggacttaaccgtccctttccttcgggacaggggagacaggtggtgcatggttgtcgtcagctcgtgtcgtgagatgttgggttaagtcccgcaacgagcgcaacccctatccttagtagccagcacgtagtggtgggcactctgaggagactgccagggataacctggaggaaggcggggatgacgtcaaatcatcatgccccttatgatttgggctacacacgtgctacaatggcgtaaacaaagggaagcgaacccgcgagggtgggcaaatctcaaaaataacgtcccagttcggactgcagtctgcaactcgactgcacgaagctggaatcgctagtaatcgcggatcagaatgccgcggtgaatacgttcccgggtcttgtacacaccgcccgtcacaccatgggagtcagtaacgcccgaagtcagtgacctaaccgcaanggaggagcnnc

SEQ ID NO: 119 - DNA, 1406 bp, Blautia obeum
  modified_base (2)..(3): a, c, t, g, unknown or other
  modified_base (19)..(21): a, c, t, g, unknown or other
  modified_base (23)..(29): a, c, t, g, unknown or other
  modified_base (51)..(54): a, c, t, g, unknown or other
  modified_base (669)..(669): a, c, t, g, unknown or other
  modified_base (949)..(951): a, c, t, g, unknown or other
  modified_base (953)..(953): a, c, t, g, unknown or other
  modified_base (1381)..(1382): a, c, t, g, unknown or other
  modified_base (1396)..(1396): a, c, t, g, unknown or other
  modified_base (1404)..(1404): a, c, t, g, unknown or other
anncatgcagtcgaacggnnnannnnnnnattgaagcttcggcagatttannnnggtttctagtggcggacgggtgagtaacgcgtgggtaacctgccttatacagggggataacaaccagaaatggttgctaataccgcataagcgcacaggaccgcatggtccggtgtgaaaaactccggtggtataagatggacccgcgttggattagctagttggcagggtaacggcctaccaaggcgacgatccatagccggcctgagagggtgaacggccacattgggactgagacacggcccagactcctacgggaggcagcagtggggaatattgcacaatgggggaaaccctgatgcagcgacgccgcgtgaaggaagaagtatctcggtatgtaaacttctatcagcagggaagatagtgacggtacctgactaagaagccccggctaactacgtgccagcagccgcggtaatacgtagggggcaagcgttatccggatttactgggtgtaaagggagcgtagacggactggcaagtctgatgtgaaaggcgggggctcaacccctggactgcattggaaactgttagtcttgagtgccggagaggtaagcggaattcctagtgtagcggtgaaatgcgtagatattaggaggaacaccagtggcgaanggcggcttactggacggtaactgacgttgaggctcgaaagcgtggggagcaaacaggattagataccctggtagtccacgccgtaaacgatgaatactaggtgttggggagcaaagctcttcggtgccgccgcaaacgcattaagtattccacctggggagtacgttcgcaagaatgaaactcaaaggaattgacggggacccgcacaagcggtggagcatgtggtttaattcgaagcaacgcgaagaaccttaccaagtcttgacatccctctgaccgnnncntaaccgagtctttccttcgggacagaggagacaggtggtgcatggttgtcgtcagctcgtgtcgtgagatgttgggttaagtcccgcaacgagcgcaacccctatccccagtagccagcagtccggccgggcactctgaggagactgccagggataacctggaggaaggcggggatgacgtcaaatcatcatgccccttatgatttgggctacacacgtgctacaatggcgtaaacaaagggaagcaagcctgcgaaggtaagcaaatcccaaaaataacgtcccagttcggactgcagtctgcaactcgactgcacgaagctggaatcgctagtaatcgcggatcagaatgccgcggtgaatacgttcccgggtcttgtacacaccgcccgtcacaccatgggagtcagtaacgcccgaagtcagtnncctaactgcaaagnaaggagcngc

SEQ ID NO: 120 - DNA, 1397 bp, Unknown
  Description of Unknown: Hungatella effluvii sequence
  modified_base (3)..(4): a, c, t, g, unknown or other
  modified_base (20)..(20): a, c, t, g, unknown or other
  modified_base (44)..(44): a, c, t, g, unknown or other
  modified_base (1387)..(1387): a, c, t, g, unknown or other
tgnnagtcgagcgaagcggntcttcggaagttttcggatggaanaggaattgacttagcggcggacgggtgagtaacgcgtgggtaacctgccttacactgggggataacagttagaaatgactgctaataccgcataagcgcacagggccgcatggcctggtgtgaaaaactccggtggtgtaagatggacccgcgtctgattaggtagttggtggggtaacggcccaccaagccgacgatcagtagccgacctgagagggtgaccggccacattgggactgagacacggcccaaactcctacgggaggcagcagtggggaatattggacaatgggcgaaagcctgatccagcgacgccgcgtgagtgaagaagtatttcggtatgtaaagctctatcagcagggaagaaaaatgacggtacctgactaagaagccccggctaactacgtgccagcagccgcggtaatacgtagggggcaagcgttatccggatttactgggtgtaaagggagcgtagacggtttagcaagtctgaagtgaaagcccggggctcaaccccggtactgctttggaaactgttagacttgagtgcaggagaggtaagtggaattcctagtgtagcggtgaaatgcgtagatattaggaggaacaccagtggcgaaggcggcttactggactgtaactgacgttgaggctcgaaagcgtggggagcaaacaggattagataccctggtagtccacgccgtaaacgatgaatactaggtgtcggggggcaaagcccttcggtgccgccgcaaacgcaataagtattccacctggggagtacgttcgcaagaatgaaactcaaaggaattgacggggacccgcacaagcggtggagcatgtggtttaattcgaagcaacgcgaagaaccttaccaagtcttgacatcccactgaaaacactttaaccggtgtccctcttcggagcagtggagacaggtggtgcatggttgtcgtcagctcgtgtcgtgagatgttgggttaagtcccgcaacgagcgcaacccttatccttagtagccagcgagtagagtcgggcactctggggagactgccagggataacctggaggaaggtggggatgacgtcaaatcatcatgccccttatgatttgggctacacacgtgctacaatggcgtaaacaaagggaggcaaaggagcgatctggagcaaaccccaaaaataacgtctcagttcggattgcaggctgcaactcgcctgcatgaagctggaatcgctagtaatcgcgaatcagaatgtcgcggtgaatacgttcccgggtcttgtacacaccgcccgtcacaccatgggagttggtaacgcccgaagtcagtgacccaaccgnaaggagggag

SEQ ID NO: 121 - DNA, 1387 bp, Bacteroides vulgatus
  modified_base (3)..(3): a, c, t, g, unknown or other
  modified_base (1377)..(1377): a, c, t, g, unknown or other
acncatgcaagtcgaggggcagcatggtcttagcttgctaaggccgatggcgaccggcgcacgggtgagtaacacgtatccaacctgccgtctactcttggacagccttctgaaaggaagattaatacaagatggcatcatgagtccgcatgttcacatgattaaaggtattccggtagacgatggggatgcgttccattagatagtaggcggggtaacggcccacctagtcttcgatggataggggttctgagaggaaggtcccccacattggaactgagacacggtccaaactcctacgggaggcagcagtgaggaatattggtcaatgggcgagagcctgaaccagccaagtagcgtgaaggatgactgccctatgggttgtaaacttcttttataaaggaataaagtcgggtatggatacccgtttgcatgtactttatgaataaggatcggctaactccgtgccagcagccgcggtaatacggaggatccgagcgttatccggatttattgggtttaaagggagcgtagatggatgtttaagtcagttgtgaaagtttgcggctcaaccgtaaaattgcagttgatactggatatcttgagtgcagttgaggcaggcggaattcgtggtgtagcggtgaaatgcttagatatcacgaagaactccgattgcgaaggcagcctgctaagctgcaactgacattgaggctcgaaagtgtgggtatcaaacaggattagataccctggtagtccacacggtaaacgatgaatactcgctgtttgcgatatactgcaagcggccaagcgaaagcgttaagtattccacctggggagtacgccggcaacggtgaaactcaaaggaattgacgggggcccgcacaagcggaggaacatgtggtttaattcgatgatacgcgaggaaccttacccgggcttaaattgcagatgaattacggtgaaagccgtaagccgcaaggcatctgtgaaggtgctgcatggttgtcgtcagctcgtgccgtgaggtgtcggcttaagtgccataacgagcgcaacccttgttgtcagttactaacaggttccgctgaggactctgacaagactgccatcgtaagatgtgaggaaggtggggatgacgtcaaatcagcacggcccttacgtccggggctacacacgtgttacaatggggggtacagagggccgctaccacgcgagtggatgccaatccccaaaacctctctcagttcggactggagtctgcaacccgactccacgaagctggattcgctagtaatcgcgcatcagccacggcgcggtgaatacgttcccgggccttgtacacaccgcccgtcaagccatgggagccgggggtacctnaagtgcgtaa

SEQ ID NO: 122 - DNA, 1389 bp, Bacteroides uniformis
  modified_base (1388)..(1388): a, c, t, g, unknown or other
tgcagtcgaggggcagcatgaacttagcttgctaagtttgatggcgaccggcgcacgggtgagtaacacgtatccaacctgccgatgactcggggatagcctttcgaaagaaagattaatacccgatggcatagttcttccgcatggtggaactattaaagaatttcggtcatcgatggggatgcgttccattaggttgttggcggggtaacggcccaccaagccttcgatggataggggttctgagaggaaggtcccccacattggaactgagacacggtccaaactcctacgggaggcagcagtgaggaatattggtcaatggacgagagtctgaaccagccaagtagcgtgaaggatgactgccctatgggttgtaaacttcttttatacgggaataaagtgaggcacgcgtgcctttttgtatgtaccgtatgaataaggatcggctaactccgtgccagcagccgcggtaatacggaggatccgagcgttatccggatttattgggtttaaagggagcgtaggcggacgcttaagtcagttgtgaaagtttgcggctcaaccgtaaaattgcagttgatactgggtgtcttgagtacagtagaggcaggcggaattcgtggtgtagcggtgaaatgcttagatatcacgaagaactccgattgcgaaggcagcctgctggactgtaactgacgctgatgctcgaaagtgtgggtatcaaacaggattagataccctggtagtccacacagtaaacgatgaatactcgctgtttgcgatatacagtaagcggccaagcgaaagcgttaagtattccacctggggagtacgccggcaacggtgaaactcaaaggaattgacgggggcccgcacaagcggaggaacatgtggtttaattcgatgatacgcgaggaaccttacccgggcttgaattgcaactgaatgatgtggagacatgtcagccgcaaggcagttgtgaaggtgctgcatggttgtcgtcagctcgtgccgtgaggtgtcggcttaagtgccataacgagcgcaacccttatcgatagttaccatcaggtgatgctggggactctgtcgagactgccgtcgtaagatgtgaggaaggtggggatgacgtcaaatcagcacggcccttacgtccggggctacacacgtgttacaatggggggtacagaaggcagctacacggcgacgtgatgctaatcccgaaagcctctctcagttcggattggagtctgcaacccgactccatgaagctggattcgctagtaatcgcgcatcagccacggcgcggtgaatacgttcccgggccttgtacacaccgcccgtcaagccatgaaagccgggggtacctgaagtgcgtaaccgcaagna

SEQ ID NO: 123 - DNA, 1396 bp, Roseburia hominis
tgcaagtcgaacgaagcactttaattgatttcttcggaatgaagtttttgtgactgagtggcggacgggtgagtaacgcgtgggtaacctgcctcatacagggggataacagttggaaacgactgctaataccgcataagcgcacaggattgcatgatccagtgtgaaaaactccggtggtatgagatggacccgcgtctgattagccagttggcggggtaacggcccaccaaagcgacgatcagtagccgacctgagagggtgaccggccacattgggactgagacacggcccaaactcctacgggaggcagcagtggggaatattgcacaatgggggaaaccctgatgcagcgacgccgcgtgagcgaagaagtatttcggtatgtaaagctctatcagcagggaagaagaatgacggtacctgactaagaagcaccggctaaatacgtgccagcagccgcggtaatacgtatggtgcaagcgttatccggatttactgggtgtaaagggagcgcaggcggtacggcaagtctgatgtgaaatcccggggctcaaccccggtactgcattggaaactgtcggactagagtgtcggaggggtaagtggaattcctagtgtagcggtgaaatgcgtagatattaggaggaacaccagtggcgaaggcggcttactggacgattactgacgctgaggctcgaaagcgtggggagcaaacaggattagataccctggtagtccacgccgtaaacgatgaatactaggtgtcggggagcattgctcttcggtgccgcagcaaacgcaataagtattccacctggggagtacgttcgcaagaatgaaactcaaaggaattgacggggacccgcacaagcggtggagcatgtggtttaattcgaagcaacgcgaagaaccttaccaagtcttgacatcccactgacaaagtatgtaatgtactttctcttcggagcagtggtgacaggtggtgcatggttgtcgtcagctcgtgtcgtgagatgttgggttaagtcccgcaacgagcgcaacccctattcttagtagccagcggttcggccgggcactctagggagactgccagggataacctggaggaaggtggggatgacgtcaaatcatcatgccccttatgacttgggctacacacgtgctacaatggcgtaaacaaagggaagcaatcccgcgagggggagcaaatctcaaaaataacgtctcagttcggactgtagtctgcaactcgactacacgaagctggaatcgctagtaatcgcgaatcagaatgtcgcggtgaatacgttcccgggtcttgtacacaccgcccgtcacaccatgggagttggtaatgcccgaagtcagtgacccaaccgcaaggagggag

SEQ ID NO: 124 - DNA, 1382 bp, Anaerostipes hadrus
tcgaacgaaacaccttatttgattttcttcggaactgaagatttggtgattgagtggcggacgggtgagtaacgcgtgggtaacctgccctgtacagggggataacagtcagaaatgactgctaataccgcataagaccacagcaccgcatggtgcaggggtaaaaactccggtggtacaggatggacccgcgtctgattagctggttggtgaggtaacggctcaccaaggcgacgatcagtagccggcttgagagagtgaacggccacattgggactgagacacggcccaaactcctacgggaggcagcagtggggaatattgcacaatgggggaaaccctgatgcagcgacgccgcgtgagtgaagaagtatcttcggtatgtaaagctctatcagcagggaagaaaatgacggtacctgactaagaagccccggctaactacgtgccagcagccgcggtaatacgtagggggcaagcgttatccggaattactgggtgtaaagggtgcgtaggtggtatggcaagtcagaagtgaaaacccagggcttaactctgggactgcttttgaaactgtcagactggagtgcaggagaggtaagcggaattcctagtgtagcggtgaaatgcgtagatattaggaggaacatcagtggcgaaggcggcttactggactgaaactgacactgaggcacgaaagcgtggggagcaaacaggattagataccctggtagtccacgccgtaaacgatgaatactaggtgtcggggccgtagaggcttcggtgccgcagccaacgcagtaagtattccacctggggagtacgttcgcaagaatgaaactcaaaggaattgacggggacccgcacaagcggtggagcatgtggtttaattcgaagcaacgcgaagaaccttacctggtcttgacatccttctgaccggtccttaaccggacctttccttcgggacaggagagacaggtggtgcatggttgtcgtcagctcgtgtcgtgagatgttgggttaagtcccgcaacgagcgcaacccctatctttagtagccagcatataaggtgggcactctagagagactgccagggataacctggaggaaggtggggacgacgtcaaatcatcatgccccttatgaccagggctacacacgtgctacaatggcgtaaacagagggaagcagcctcgtgagagtgagcaaatcccaaaaataacgtctcagttcggattgtagtctgcaactcgactacatgaagctggaatcgctagtaatcgcgaatcagaatgtcgcggtgaatacgttcccgggtcttgtacacaccgcccgtcacaccatgggagtcagtaacgcccgaagtcagtgacccaaccgt

SEQ ID NO: 125 - DNA, 1379 bp, Bacteroides stercoris
  modified_base (1370)..(1370): a, c, t, g, unknown or other
gcaagtcgaggggcagcatcatcaaagcttgctttgatggatggcgaccggcgcacgggtgagtaacacgtatccaacctgccgacaacactgggatagcctttcgaaagaaagattaataccggatggcatagttttcccgcatgggataattattaaagaatttcggttgtcgatggggatgcgttccattaggcagttggcggggtaacggcccaccaaaccaacgatggataggggttctgagaggaaggtcccccacattggaactgagacacggtccaaactcctacgggaggcagcagtgaggaatattggtcaatggacgagagtctgaaccagccaagtagcgtgaaggatgactgccctatgggttgtaaacttcttttatacgggaataaagtgagccacgtgtggctttttgtatgtaccgtatgaataaggatcggctaactccgtgccagcagccgcggtaatacggaggatccgagcgttatccggatttattgggtttaaagggagcgtaggcgggttgttaagtcagttgtgaaagtttgcggctcaaccgtaaaattgcagttgatactggcgaccttgagtgcaacagaggtaggcggaattcgtggtgtagcggtgaaatgcttagatatcacgaagaactccgattgcgaaggcagcttactggattgtaactgacgctgatgctcgaaagtgtgggtatcaaacaggattagataccctggtagtccacacagtaaacgatgaatactcgctgttggcgatatacagtcagcggccaagcgaaagcattaagtattccacctggggagtacgccggcaacggtgaaactcaaaggaattgacgggggcccgcacaagcggaggaacatgtggtttaattcgatgatacgcgaggaaccttacccgggcttaaattgcaactgacggaaccggaaacggttctttcttcggacagttgtgaaggtgctgcatggttgtcgtcagctcgtgccgtgaggtgtcggcttaagtgccataacgagcgcaacccttacgggtagttaccatcaggttatgctggggactctacccggactgccgtcgtaagatgtgaggaaggtggggatgacgtcaaatcagcacggcccttacgtccggggctacacacgtgttacaatggggggtacagaaggcagctacacggcgacgtggtgctaatcccgaaagcctctctcagttcggattggagtctgcaacccgactccatgaagctggattcgctagtaatcgcgcatcagccacggcgcggtgaatacgttcccgggccttgtacacaccgcccgtcaagccatgaaagccgggggtacctnaagtacgta

SEQ ID NO: 126 - DNA, 1372 bp, Bifidobacterium adolescentis
  modified_base (16)..(16): a, c, t, g, unknown or other
tgcagtcgaacgggancccaggagcttgctcctgggtgagagtggcgaacgggtgagtaatgcgtgaccgacctgccccatacaccggaatagctcctggaaacgggtggtaatgccggatgctccagttggatgcatgtccttctgggaaagattcatcggtatgggatggggtcgcgtcctatcagcttgatggcggggtaacggcccaccatggcttcgacgggtagccggcctgagagggcgaccggccacattgggactgagatacggcccagactcctacgggaggcagcagtggggaatattgcacaatgggcgcaagcctgatgcagcgacgccgcgtgcgggatgacggccttcgggttgtaaaccgcttttgactgggagcaagcccttcggggtgagtgtacctttcgaataagcaccggctaactacgtgccagcagccgcggtaatacgtagggtgcaagcgttatccggaattattgggcgtaaagggctcgtaggcggttcgtcgcgtccggtgtgaaagtccatcgcttaacggtggatccgcgccgggtacgggcgggcttgagtgcggtaggggagactggaattcccggtgtaacggtggaatgtgtagatatcgggaagaacaccaatggcgaaggcaggtctctgggccgtcactgacgctgaggagcgaaagcgtggggagcgaacaggattagataccctggtagtccacgccgtaaacggtggatgctggatgtggggaccattccacggtctccgtgtcggagccaacgcgttaagcatcccgcctggggagtacggccgcaaggctaaaactcaaagaaattgacgggggcccgcacaagcggcggagcatgcggattaattcgatgcaacgcgaagaaccttacctgggcttgacatgttcccgacagccccagagatggggcctcccttcggggcgggttcacaggtggtgcatggtcgtcgtcagctcgtgtcgtgagatgttgggttaagtcccgcaacgagcgcaaccctcgccctgtgttgccagcacgtcgtggtgggaactcacgggggaccgccggggtcaactcggaggaaggtggggatgacgtcagatcatcatgccccttacgtccagggcttcacgcatgctacaatggccggtacaacgggatgcgacactgtgaggtggagcggatcccttaaaaccggtttcagttcggattggagtttgcaacccgactccatgaaggcggagtcgctagtaatcgcggatcagcaacgccgcggtgaatgcgttcccgggccttgtacacaccgcccgtcaagtcatgaaagtgggtagcacccgaagccggtggcc

SEQ ID NO: 127 - DNA, 1190 bp, Collinsella aerofaciens
  modified_base (1)..(10): a, c, t, g, unknown or other
  modified_base (13)..(13): a, c, t, g, unknown or other
  modified_base (767)..(769): a, c, t, g, unknown or other
  modified_base (772)..(772): a, c, t, g, unknown or other
  modified_base (781)..(781): a, c, t, g, unknown or other
  modified_base (783)..(783): a, c, t, g, unknown or other
  modified_base (785)..(785): a, c, t, g, unknown or other
  modified_base (787)..(787): a, c, t, g, unknown or other
  modified_base (789)..(789): a, c, t, g, unknown or other
  modified_base (792)..(792): a, c, t, g, unknown or other
  modified_base (798)..(800): a, c, t, g, unknown or other
  modified_base (802)..(802): a, c, t, g, unknown or other
  modified_base (804)..(804): a, c, t, g, unknown or other
  modified_base (806)..(806): a, c, t, g, unknown or other
  modified_base (811)..(811): a, c, t, g, unknown or other
  modified_base (816)..(819): a, c, t, g, unknown or other
  modified_base (821)..(821): a, c, t, g, unknown or other
  modified_base (823)..(823): a, c, t, g, unknown or other
  modified_base (825)..(827): a, c, t, g, unknown or other
  modified_base (829)..(829): a, c, t, g, unknown or other
  modified_base (835)..(835): a, c, t, g, unknown or other
  modified_base (839)..(839): a, c, t, g, unknown or other
  modified_base (841)..(844): a, c, t, g, unknown or other
  modified_base (847)..(847): a, c, t, g, unknown or other
  modified_base (850)..(850): a, c, t, g, unknown or other
  modified_base (856)..(856): a, c, t, g, unknown or other
  modified_base (858)..(860): a, c, t, g, unknown or other
  modified_base (862)..(862): a, c, t, g, unknown or other
  modified_base (865)..(869): a, c, t, g, unknown or other
  modified_base (871)..(871): a, c, t, g, unknown or other
  modified_base (874)..(874): a, c, t, g, unknown or other
  modified_base (881)..(881): a, c, t, g, unknown or other
  modified_base (884)..(886): a, c, t, g, unknown or other
  modified_base (890)..(891): a, c, t, g, unknown or other
  modified_base (893)..(897): a, c, t, g, unknown or other
  modified_base (900)..(900): a, c, t, g, unknown or other
  modified_base (902)..(906): a, c, t, g, unknown or other
  modified_base (910)..(913): a, c, t, g, unknown or other
  modified_base (917)..(918): a, c, t, g, unknown or other
  modified_base (928)..(928): a, c, t, g, unknown or other
  modified_base (930)..(931): a, c, t, g, unknown or other
  modified_base (939)..(940): a, c, t, g, unknown or other
  modified_base (942)..(942): a, c, t, g, unknown or other
  modified_base (946)..(947): a, c, t, g, unknown or other
  modified_base (951)..(955): a, c, t, g, unknown or other
  modified_base (957)..(957): a, c, t, g, unknown or other
  modified_base (959)..(961): a, c, t, g, unknown or other
  modified_base (967)..(968): a, c, t, g, unknown or other
  modified_base (970)..(971): a, c, t, g, unknown or other
  modified_base (974)..(974): a, c, t, g, unknown or other
  modified_base (978)..(979): a, c, t, g, unknown or other
  modified_base (983)..(986): a, c, t, g, unknown or other
  modified_base (988)..(988): a, c, t, g, unknown or other
  modified_base (990)..(999): a, c, t, g, unknown or other
  modified_base (1001)..(1010): a, c, t, g, unknown or other
  modified_base (1013)..(1018): a, c, t, g, unknown or other
  modified_base (1021)..(1035): a, c, t, g, unknown or other
  modified_base (1038)..(1039): a, c, t, g, unknown or other
  modified_base (1042)..(1042): a, c, t, g, unknown or other
  modified_base (1045)..(1046): a, c, t, g, unknown or other
  modified_base (1048)..(1049): a, c, t, g, unknown or other
  modified_base (1051)..(1059): a, c, t, g, unknown or other
  modified_base (1062)..(1062): a, c, t, g, unknown or other
  modified_base (1064)..(1066): a, c, t, g, unknown or other
  modified_base (1068)..(1069): a, c, t, g, unknown or other
  modified_base (1071)..(1072): a, c, t, g, unknown or other
  modified_base (1074)..(1074): a, c, t, g, unknown or other
  modified_base (1076)..(1076): a, c, t, g, unknown or other
  modified_base (1078)..(1086): a, c, t, g, unknown or other
  modified_base (1088)..(1091): a, c, t, g, unknown or other
  modified_base (1094)..(1100): a, c, t, g, unknown or other
  modified_base (1103)..(1105): a, c, t, g, unknown or other
  modified_base (1107)..(1107): a, c, t, g, unknown or other
  modified_base (1109)..(1113): a, c, t, g, unknown or other
  modified_base (1115)..(1125): a, c, t, g, unknown or other
  modified_base (1127)..(1157): a, c, t, g, unknown or other
  modified_base (1159)..(1172): a, c, t, g, unknown or other
  modified_base (1174)..(1175): a, c, t, g, unknown or other
  modified_base (1177)..(1179): a, c, t, g, unknown or other
  modified_base (1184)..(1188): a, c, t, g, unknown or other
  modified_base (1190)..(1190): a, c, t, g, unknown or other
nnnnnnnnnntgnaagtcgaacggcacctgccctcgggcagaagcgagtggcgaacggctgagtaacacgtggagaacctgccccctcccccgggatagccgcccgaaaggacgggtaataccggataccccggggtgccgcatggcaccccggctaaagccccgacgggaggggatggctccgcggcccatcaggtagacggcggggtgacggcccaccgtgccgacaacgggtagccgggttgagagaccgaccggccagattgggactgagacacggcccagactcctacgggaggcagcagtggggaatcttgcgcaatggggggaaccctgacgcagcgacgccgcgtgcgggacggaggccttcgggtcgtaaaccgctttcagcagggaagagtcaagactgtacctgcagaagaagccccggctaactacgtgccagcagccgcggtaatacgtagggggcgagcgttatccggattcattgggcgtaaagcgcgcgtaggcggcccggcaggccgggggtcgaagcggggggctcaaccccccgaagcccccggaacctccgcggcttgggtccggtaggggagggtggaacacccggtgtagcggtggaatgcgcagatatcgggtggaacaccggtggcgaaggcggccctctgggccgagaccgacgctgaggcgcgaaagctgggggagcgaacaggattagataccctggtagtcccagccgtaaacgatggacgctaggtgtgggggggggnnnatncccccctgncncncncnacncacttnnngncncncccgnggagnnnngncncnnngngtaaantctnannnnttnacngggggncnnncnaannnnngnagnatgtggnttnnntttnnannnnncgnannnnntttnnnnggtnnacatatgggngnnacgggggnnancccnngggnnnnnangnnnccctanngnnggngcanngctnnnncnannnnnnnnnngnnnnnnnnnnggnnnnnnccnnnnnnnnnnnnnnnccnnccncgnngnntnnnnnnnnnggngnnngnncnngnancnnnnnnnnncnnnnccnnnnnnnggnnnanannnnngnnnnnnnnnnntnnnnnnnnnnnnnnnnnnnnnnnnnnnnnnnannnnnnnnnnnnnncnncnnngggannnnnan

SEQ ID NO: 128 - DNA, 1402 bp, Unknown
  Description of Unknown: Hungatella effluvii sequence
  modified_base (2)..(5): a, c, t, g, unknown or other
  modified_base (10)..(10): a, c, t, g, unknown or other
annnntgcangtcgagcgaagcggtttcgatgaagttttcggatggatttgaaatcgacttagcggcggacgggtgagtaacgcgtgggtaacctgccttacactgggggataacagttagaaatgactgctaataccgcataagcgcacagggccgcatggtctggtgtgaaaaactccggtggtgtaagatggacccgcgtctgattaggtagttggtggggtaacggcccaccaagccgacgatcagtagccgacctgagagggtgaccggccacattgggactgagacacggcccaaactcctacgggaggcagcagtggggaatattggacaatgggcgaaagcctgatccagcgacgccgcgtgagtgaagaagtatttcggtatgtaaagctctatcagcagggaagaaaatgacggtacctgactaagaagccccggctaactacgtgccagcagccgcggtaatacgtagggggcaagcgttatccggatttactgggtgtaaagggagcgtagacggttaagcaagtctgaagtgaaagcccggggctcaaccccggtactgctttggaaactgtttgacttgagtgcaggagaggtaagtggaattcctagtgtagcggtgaaatgcgtagatattaggaggaacaccagtggcgaaggcggcttactggactgtaactgacgttgaggctcgaaagcgtggggagcaaacaggattagataccctggtagtccacgccgtaaacgatgaatactaggtgtcgggggacaaagtccttcggtgccgccgctaacgcaataagtattccacctggggagtacgttcgcaagaatgaaactcaaaggaattgacggggacccgcacaagcggtggagcatgtggtttaattcgaagcaacgcgaagaaccttaccaagtcttgacatcccattgaaaatcatttaaccgtgatccctcttcggagcaatggagacaggtggtgcatggttgtcgtcagctcgtgtcgtgagatgttgggttaagtcccgcaacgagcgcaacccttatccttagtagccagcaagtaatgttgggcactctggggagactgccagggataacctggaggaaggtggggatgacgtcaaatcatcatgccccttatgatttgggctacacacgtgctacaatggcgtaaacaaagggaagcaaaggagcgatctggagcaaaccccaaaaataacgtctcagttcggattgcaggctgcaactcgcctgcatgaagctggaatcgctagtaatcgcgaatcagaatgtcgcggtgaatacgttcccgggtcttgtacacaccgcccgtcacaccatgggagttggtaacgcccgaagtcagtgacccaaccgtaaggagggagc

SEQ ID NO: 129 - DNA, 1397 bp, Escherichia flexneri
  modified_base (19)..(21): a, c, t, g, unknown or other
  modified_base (31)..(31): a, c, t, g, unknown or other
aagtcgaacggtaacaggnnncagcttgctngcttcgctgacgagtggcggacgggtgagtaatgtctgggaaactgcctgatggagggggataactactggaaacggtagctaataccgcataacgtcgcaagaccaaagagggggaccttcgggcctcttgccatcggatgtgcccagatgggattagcttgttggtggggtaacggctcaccaaggcgacgatccctagctggtctgagaggatgaccagccacactggaactgagacacggtccagactcctacgggaggcagcagtggggaatattgcacaatgggcgcaagcctgatgcagccatgccgcgtgtatgaagaaggccttcgggttgtaaagtactttcagcggggaggaagggagtaaagttaatacctttgctcattgacgttacccgcagaagaagcaccggctaactccgtgccagcagccgcggtaatacggagggtgcaagcgttaatcggaattactgggcgtaaagcgcacgcaggcggtttgttaagtcagatgtgaaatccccgggctcaacctgggaactgcatctgatactggcaagcttgagtctcgtagaggggggtagaattccaggtgtagcggtgaaatgcgtagagatctggaggaataccggtggcgaaggcggccccctggacgaagactgacgctcaggtgcgaaagcgtggggagcaaacaggattagataccctggtagtccacgccgtaaacgatgtcgacttggaggttgtgcccttgaggcgtggcttccggagctaacgcgttaagtcgaccgcctggggagtacggccgcaaggttaaaactcaaatgaattgacgggggcccgcacaagcggtggagcatgtggtttaattcgatgcaacgcgaagaaccttacctggtcttgacatccacggaagttttcagagatgagaatgtgccttcgggaaccgtgagacaggtgctgcatggctgtcgtcagctcgtgttgtgaaatgttgggttaagtcccgcaacgagcgcaacccttatcctttgttgccagcggtccggccgggaactcaaaggagactgccagtgataaactggaggaaggtggggatgacgtcaagtcatcatggcccttacgaccagggctacacacgtgctacaatggcgcatacaaagagaagcgacctcgcgagagcaagcggacctcataaagtgcgtcgtagtccggattggagtctgcaactcgactccatgaagtcggaatcgctagtaatcgtggatcagaatgccacggtgaatacgttcccgggccttgtacacaccgcccgtcacaccatgggagtgggttgcaaaagaagtaggtagcttaaccttcgg

SEQ ID NO: 130 - DNA, 1394 bp, Coprococcus comes
tgcagtcgaacgaagcacttatctttgattcttcggatgaagaggtttgtgactgagtggcggacgggtgagtaacgcgtgggtaacctgcctcatacagggggataacagttagaaatgactgctaataccgcataagaccacggagccgcatggctcagtgggaaaaactccggtggtatgagatggacccgcgtctgattaggtagttggtggggtaacggcctaccaagccaacgatcagtagccgacctgagagggtgaccggccacattgggactgagacacggcccaaactcctacgggaggcagcagtggggaatattgcacaatgggggaaaccctgatgcagcgacgccgcgtgagcgaagaagtatttcggtatgtaaagctctatcagcagggaagaaaatgacggtacctgactaagaagcaccggctaaatacgtgccagcagccgcggtaatacgtatggtgcaagcgttatccggatttactgggtgtaaagggagcgtagacggctgtgtaagtctgaagtgaaagcccggggctcaaccccgggactgctttggaaactatgcagctagagtgtcggagaggtaagtggaattcccagtgtagcggtgaaatgcgtagatattgggaggaacaccagtggcgaaggcggcttactggacgatgactgacgttgaggctcgaaagcgtggggagcaaacaggattagataccctggtagtccacgccgtaaacgatgactactaggtgtcggggagcaaagctcttcggtgccgcagcaaacgcaataagtagtccacctggggagtacgttcgcaagaatgaaactcaaaggaattgacggggacccgcacaagcggtggagcatgtggtttaattcgaagcaacgcgaagaaccttacctgctcttgacatcccggtgaccggcatgtaatgatgccttttcttcggaacaccggtgacaggtggtgcatggttgtcgtcagctcgtgtcgtgagatgttgggttaagtcccgcaacgagcgcaacccttatcttcagtagccagcaattcggatgggcactctggagagactgccagggataacctggaggaaggtggggatgacgtcaaatcatcatgccccttatgagcagggctacacacgtgctacaatggcgtaaacaaagggaagcgagcctgcgagggtaagcaaatctcaaaaataacgtctcagttcggattgtagtctgcaactcgactacatgaagctggaatcgctagtaatcgcgaatcagcatgtcgcggtgaatacgttcccgggtcttgtacacaccgcccgtcacaccatgggagttggtaacgcccgaagtcagtgacccaaccgcaaggagggag

SEQ ID NO: 131 - DNA, 1213 bp, Unknown
  Description of Unknown: Fusicatenibacter saccharivorans sequence
  modified_base (1)..(33): a, c, t, g, unknown or other
  modified_base (35)..(50): a, c, t, g, unknown or other
  modified_base (53)..(61): a, c, t, g, unknown or other
  modified_base (65)..(66): a, c, t, g, unknown or other
  modified_base (68)..(72): a, c, t, g, unknown or other
  modified_base (74)..(74): a, c, t, g, unknown or other
  modified_base (79)..(80): a, c, t, g, unknown or other
  modified_base (82)..(86): a, c, t, g, unknown or other
  modified_base (88)..(93): a, c, t, g, unknown or other
  modified_base (97)..(98): a, c, t, g, unknown or other
  modified_base (102)..(110): a, c, t, g, unknown or other
  modified_base (113)..(113): a, c, t, g, unknown or other
  modified_base (115)..(115): a, c, t, g, unknown or other
  modified_base (118)..(118): a, c, t, g, unknown or other
  modified_base (122)..(123): a, c, t, g, unknown or other
  modified_base (126)..(127): a, c, t, g, unknown or other
  modified_base (130)..(130): a, c, t, g, unknown or other
  modified_base (139)..(140): a, c, t, g, unknown or other
  modified_base (143)..(145): a, c, t, g, unknown or other
  modified_base (148)..(148): a, c, t, g, unknown or other
  modified_base (153)..(156): a, c, t, g, unknown or other
  modified_base (160)..(160): a, c, t, g, unknown or other
  modified_base (168)..(168): a, c, t, g, unknown or other
  modified_base (170)..(170): a, c, t, g, unknown or other
  modified_base (174)..(177): a, c, t, g, unknown or other
  modified_base (185)..(188): a, c, t, g, unknown or other
  modified_base (190)..(190): a, c, t, g, unknown or other
  modified_base (195)..(197): a, c, t, g, unknown or other
  modified_base (208)..(210): a, c, t, g, unknown or other
  modified_base (220)..(220): a, c, t, g, unknown or other
  modified_base (222)..(222): a, c, t, g, unknown or other
  modified_base (288)..(288): a, c, t, g, unknown or other
  modified_base (401)..(401): a, c, t, g, unknown or other
  modified_base (428)..(428): a, c, t, g, unknown or other
  modified_base (1195)..(1196): a, c, t, g, unknown or other
  modified_base (1198)..(1199): a, c, t, g, unknown or other
  modified_base (1201)..(1201): a, c, t, g, unknown or other
  modified_base (1203)..(1213): a, c, t, g, unknown or other
nnnnnnnnnnnnnnnnnnnnnnnnnnnnnnnnngnnnnnnnnnnnnnnnnccnnnnnnnnngatnngnnnnngnctganngnnnnncnnnnnntggnntgannnnnnnnnaantnctncggnnggnngcngtggggaanntgnnnaanggggnnnncccngatgcagngncgcnnnntgagcgannnntntttcnnnatgtaaagctnnnatcagcaggnangataatgacggtacctgactaagaagccccggctaactacgtgccagcagccgcggtaatacgtanggggcaagcgttatccggatttactgggtgtaaagggagcgtagacggcaaggcaagtctgatgtgaaaacccagggcttaaccctgggactgcattggaaactgtctggctngagtgccggagaggtaagcggaattcntagtgtagcggtgaaatgcgtagatattaggaagaacaccagtggcgaaggcggcttactggacggtaactgacgttgaggctcgaaagcgtggggagcaaacaggattagataccctggtagtccacgccgtaaacgatgaatgctaggtgttggggagcaaagctcttcggtgccgccgcaaacgcattaagcattccacctggggagtacgttcgcaagaatgaaactcaaaggaattgacggggacccgcacaagcggtggagcatgtggtttaattcgaagcaacgcgaagaaccttaccaggtcttgacatcccgatgaccggcccgtaacggggccttctcttcggagcattggagacaggtggtgcatggttgtcgtcagctcgtgtcgtgagatgttgggttaagtcccgcaacgagcgcaacccttatcctcagtagccagcaggtaaagctgggcactctgtggagactgccagggataacctggaggaaggtggggatgacgtcaaatcatcatgccccttatgatctgggctacacacgtgctacaatggcgtaaacaaagggaggcaaagccgcgaggtggagcaaatcccaaaaataacgtctcagttcggactgcagtctgcaactcgactgcacgaagctggaatcgctagtaatcgcgaatcagaatgtcgcggtgaatacgttcccgggtcttgtacacaccgcccgtcacaccatgggagttggtaacgcccgaagtcagtgacccnncnntntnnnnnnnnnnn

SEQ ID NO: 132 - DNA, 1341 bp, Gordonibacter pamelaeae
  modified_base (438)..(439): a, c, t, g, unknown or other
  modified_base (671)..(671): a, c, t, g, unknown or other
  modified_base (1063)..(1063): a, c, t, g, unknown or other
tcgaacgattaagacggctccggccgtgaatagagtggcgaacgggtgagtaacacgtgaccaacctgccccctaccccgggataacgcaaggaaacctgcgctaataccggatactccttcccctgctcctgcaggggtcgggaaagcccagacggtaggggatggggtcgcggcccattaggtagacggcggggcaacggcccaccgtgcctgcgatgggtagccgggttgagagaccgaccggccacattgggactgagatacggcccagactcctacgggaggcagcagtggggaattttgcgcaatggggggaaccctgacgcagcaacgccgcgtgcgggatgaaggccttcgggttgtaaaccgctttcagcagggaagatagtgacggtacctgcagaagaagccccggctaactacgtgccagcagctnnggtaatacgtagggggcgagcgttatccggattcattgggcgtaaagcgcgcgtaggcggcccgtcaagcggaacctctaacccgagggctcaacccccggtcgggttccgaactggcaggctcgagtttggtagaggaagatggaattcccggtgtagcggtggaatgcgcagatatcgggaagaacaccgatggcgaaggcagtcttctgggccatcaactgacgctgangcgcgaaagctgggggagcgaacaggattagataccctggtagtcccagccgtaaacgatgggtgctaggtgtggggggatcatccctccgtgccgcagccaacgcattaagcaccccgcctggggagtacggccgcaaggctaaaactcaaaggaattgacgggggcccgcacaagcagcggagcatgtggcttaattcgaagccaacgcgaagaaccttaccagggcttgacatgctagtgaagccgggaaacccggtggccgagaggagctagcgcaggtggtgcatggctgtcgtcagctcgtgtcgtgagatgttgggttaagtcccgcaacgagcgcaacccctatcgtatgttgccagcattgagttggggactcatacgagacngccggcgtcaagccggaggaaggtggggacgacgtcaagtcatcatgccctttatgccctgggctgcacacgtgctacaatggccggtacaacgggccgcgacctggcgacaggaagcgaatccctcaaagccggccccagttcggatcggaggctgcaacccgcctccgtgaagtcggagttgctagtaatcgcggatcagcatgccgcggtgaatacgttcccgggccttgtacacaccgcccgtcacaccacccgagtcgtctgcacccgaagcc

SEQ ID NO: 133 - DNA, 1395 bp, Oxalobacter formigenes
  modified_base (1391)..(1392): a, c, t, g, unknown or other
  modified_base (1394)..(1394): a, c, t, g, unknown or other
agtcgaacggcagcatgggggcaaccctgatggcgagtggcgaacgggtgagtaatatatcggaacgtacccaagagtgggggacaaccagtcgaaagattggctaataccgcatacgatctaaggatgaaagtgggggaccttcgggcctcacgctcctggagcggccgatagctgattagctagttggtggggtaaaggcctaccaaggcgatgatcagtagctggtctgagaggacgatcagccacactgggactgagacacggcccagactcctacgggaggcagcagtggggaattttggacaatgggggaaaccctgatccagcaatgccgcgtgagtgaagaaggccttcgggttgtaaagctcttttgtcagggaagaaattgattgggctaatatcccgattagatgacggtacctgaagaataagcaccggctaactacgtgccagcagccgcggtaatacgtagggtgcgagcgttaatcggaattactgggcgtaaagcgtgcgcaggcggttgtgtaagacagatgtgaaatgcccgggctcaacctgggaattgcatttgtgactgcacggctagagtgtgtcagaggggggtagaattccacgtgtagcagtgaaatgcgtagatatgtggaggaataccgatggcgaaggcagccccctgggataacactgacgctcatgcacgaaagcgtggggagcaaacaggattagataccctggtagtccacgccctaaacgatgtcgactagttgttgggtcttaattgacttagtaacgcagctaacgcgtgaagtcgaccgcctggggagtacggtcgcaagattaaaactcaaaggaattgacggggacccgcacaagcggtggatgatgtggattaattcgatgcaacgcgaaaaaccttacctacccttgacatgtcaggaatcccgaagagatttgggagtgctcgaaagagagcctgaacacaggtgctgcatggctgtcgtcagctcgtgtcgtgagatgttgggttaagtcccgcaacgagcgcaacccttgtcattagttgctacgaaagggcactctaatgaaactgccggtgacaaaccggaggaaggtggggatgacgtcaagtcctcatggcccttatgggtagggcttcacacgtcatacaatggtgcatacagagggttgccaacccgagagggggagctaatctcagaaagtgcatcgtagtccggattgaagtctgcaactcgacttcatgaagttggaatcgctagtaatcgcggatcagcatgtcgcggtgaatacgttcccgggtcttgtacacaccgcccgtcacaccatgggagcgggttttaccagaagtaggtagcttaaccgtaaggagggcnntnc

SEQ ID NO: 134 - DNA, 1392 bp, Bifidobacterium adolescentis
  modified_base (3)..(3): a, c, t, g, unknown or other
  modified_base (17)..(17): a, c, t, g, unknown or other
tgnaagtcgaacgggancccaggagcttgctcctgggtgagagtggcgaacgggtgagtaatgcgtgaccgacctgccccatacaccggaatagctcctggaaacgggtggtaatgccggatgctccagttggatgcatgtccttctgggaaagattcatcggtatgggatggggtcgcgtcctatcagcttgatggcggggtaacggcccaccatggcttcgacgggtagccggcctgagagggcgaccggccacattgggactgagatacggcccagactcctacgggaggcagcagtggggaatattgcacaatgggcgcaagcctgatgcagcgacgccgcgtgcgggatgacggccttcgggttgtaaaccgcttttgactgggagcaagcccttcggggtgagtgtacctttcgaataagcaccggctaactacgtgccagcagccgcggtaatacgtagggtgcaagcgttatccggaattattgggcgtaaagggctcgtaggcggttcgtcgcgtccggtgtgaaagtccatcgcttaacggtggatccgcgccgggtacgggcgggcttgagtgcggtaggggagactggaattcccggtgtaacggtggaatgtgtagatatcgggaagaacaccaatggcgaaggcaggtctctgggccgtcactgacgctgaggagcgaaagcgtggggagcgaacaggattagataccctggtagtccacgccgtaaacggtggatgctggatgtggggaccattccacggtctccgtgtcggagccaacgcgttaagcatcccgcctggggagtacggccgcaaggctaaaactcaaagaaattgacgggggcccgcacaagcggcggagcatgcggattaattcgatgcaacgcgaagaaccttacctgggcttgacatgttcccgacagccgtagagatacggtctcccttcggggcgggttcacaggtggtgcatggtcgtcgtcagctcgtgtcgtgagatgttgggttaagtcccgcaacgagcgcaaccctcgccctgtgttgccagcacgtcgtggtgggaactcacgggggaccgccggggtcaactcggaggaaggtggggatgacgtcagatcatcatgccccttacgtccagggcttcacgcatgctacaatggccggtacaacgggatgcgacaccgcgaggtggagcggatcccttaaaaccggtctcagttcggattggagtctgcaacccgactccatgaaggcggagtcgctagtaatcgcggatcagcaacgccgcggtgaatgcgttcccgggccttgtacacaccgcccgtcaagtcatgaaagtgggtagcacccgaagccggtggcccaaccttttggggggagcc

SEQ ID NO: 135 - DNA, 1389 bp, Bifidobacterium pseudocatenulatum
  modified_base (12)..(13): a, c, t, g, unknown or other
  modified_base (1380)..(1380): a, c, t, g, unknown or other
  modified_base (1384)..(1384): a, c, t, g, unknown or other
agtcgaacgggnnccatcaggctttgcttggtggtgagagtggcgaacgggtgagtaatgcgtgaccgacctgccccatacaccggaatagctcctggaaacgggtggtaatgccggatgctccgactcctcgcatggggtgtcgggaaagattatatcggtatgggatggggtcgcgtcctatcaggtagtcggcggggtaacggcccaccgagcctacgacgggtagccggcctgagagggcgaccggccacattgggactgagatacggcccagactcctacgggaggcagcagtggggaatattgcacaatgggcgcaagcctgatgcagcgacgccgcgtgcgggatgacggccttcgggttgtaaaccgcttttgatcgggagcaagccttcgggtgagtgtacctttcgaataagcaccggctaactacgtgccagcagccgcggtaatacgtagggtgcaagcgttatccggaattattgggcgtaaagggctcgtaggcggttcgtcgcgtccggtgtgaaagtccatcgcttaacggtggatctgcgccgggtacgggcgggctggagtgcggtaggggagactggaattcccggtgtaacggtggaatgtgtagatatcgggaagaacaccaatggcgaaggcaggtctctgggccgttactgacgctgaggagcgaaagcgtggggagcgaacaggattagataccctggtagtccacgccgtaaacggtggatgctggatgtggggcccgttccacgggttccgtgtcggagctaacgcgttaagcatcccgcctggggagtacggccgcaaggctaaaactcaaagaaattgacgggggcccgcacaagcggcggagcatgcggattaattcgatgcaacgcgaagaaccttacctgggcttgacatgttcccgacagccgtagagatatggcctcccttcggggcgggttcacaggtggtgcatggtcgtcgtcagctcgtgtcgtgagatgttgggttaagtcccgcaacgagcgcaaccctcgccctgtgttgccagcacgtcatggtgggaactcacgggggaccgccggggtcaactcggaggaaggtggggatgacgtcagatcatcatgccccttacgtccagggcttcacgcatgctacaatggccggtacaacgggatgcgacacggcgacgtggagcggatccctgaaaaccggtctcagttcggattggagtctgcaacccgactccatgaaggcggagtcgctagtaatcgcggatcagcaacgccgcggtgaatgcgttcccgggccttgtacacaccgcccgtcaagtcatgaaagtgggtagcacccgaagccggtggcctaaccctttgngganggagc

SEQ ID NO: 136 - DNA, 1388 bp, Unknown
  Description of Unknown: Eisenbergiella tayi sequence
  modified_base (5)..(5): a, c, t, g, unknown or other
  modified_base (25)..(25): a, c, t, g, unknown or other
  modified_base (1380)..(1380): a, c, t, g, unknown or other
  modified_base (1383)..(1385): a, c, t, g, unknown or other
acacntgcaagtcgaacgaagttangacagaggaagttttcggatggaatcaggtataacttagtggcggacgggtgagtaacgcgtgggaaacctgccctgtaccgggggataacacttagaaataggtgctaataccgcataagcgcacggaaccgcatggttccgtgtgaaaaactccggtggtacaggatggtcccgcgtctgattagccagttggcagggtaacggcctaccaaagcgacgatcagtagccggcctgagagggtgaacggccacattgggactgagacacggcccaaactcctacgggaggcagcagtggggaatattgcacaatgggggaaaccctgatgcagcgacgccgcgtgagtgaagaagtatttcggtatgtaaagctctatcagcagggaagaaaatgacggtacctgactaagaagccccggctaactacgtgccagcagccgcggtaatacgtagggggcaagcgttatccggatttactgggtgtaaagggagcgtagacggcatggcaagccagatgtgaaaacccagggctcaaccttgggattgcatttggaactgccaggctggagtgcaggagaggtaagcggaattcctagtgtagcggtgaaatgcgtagatattaggaggaacaccagtggcgaaggcggcttactggactgtaactgacgttgaggctcgaaagcgtggggagcaaacaggattagataccctggtagtccacgcggtaaacgatgattgctaggtgtaggtgggtatggacccatcggtgccgcagctaacgcaataagcaatccacctggggagtacgttcgcaagaatgaaactcaaaggaattgacggggacccgcacaagcggtggagcatgtggtttaattcgaagcaacgcgaagaaccttaccaagtcttgacatcccaatgacgcacctgtaaagaggtgttcccttcggggcaatggagacaggtggtgcatggttgtcgtcagctcgtgtcgtgagatgttgggttaagtcccgcaacgagcgcaacccttattcttagtagccagcaggtaaagctgggcactctaaggagactgccggggataacccggaggaaggcggggatgacgtcaaatcatcatgccccttatgatttgggctacacacgtgctacaatggcgtaaacaaagggaagcgagacagtgatgtggagcaaatcccagaaataacgtctcagttcggattgtagtctgcaactcgactacatgaagctggaatcgctagtaatcgcgaatcagcatgtcgcggtgaatacgttcccgggtcttgtacacaccgcccgtcacaccatgggagttggaaatgcccgaagtcngtnnncta

SEQ ID NO: 137 - DNA, 1384 bp, Bacteroides fragilis
  modified_base (1375)..(1375): a, c, t, g, unknown or other
tcgaggggcatcaggaagaaagcttgctttctttgctggcgaccggcgcacgggtgagtaacacgtatccaacctgccctttactcggggatagcctttcgaaagaaagattaatacccgatagcataatgattccgcatggtttcattattaaaggattccggtaaaggatggggatgcgttccattaggttgttggtgaggtaacggctcaccaagccttcgatggataggggttctgagaggaaggtcccccacattggaactgagacacggtccaaactcctacgggaggcagcagtgaggaatattggtcaatgggcgctagcctgaaccagccaagtagcgtgaaggatgaaggctctatgggtcgtaaacttcttttatataagaataaagtgcagtatgtatactgttttgtatgtattatatgaataaggatcggctaactccgtgccagcagccgcggtaatacggaggatccgagcgttatccggatttattgggtttaaagggagcgtaggtggactggtaagtcagttgtgaaagtttgcggctcaaccgtaaaattgcagttgatactgtcagtcttgagtacagtagaggtgggcggaattcgtggtgtagcggtgaaatgcttagatatcacgaagaactccgattgcgaaggcagctcactggactgcaactgacactgatgctcgaaagtgtgggtatcaaacaggattagataccctggtagtccacacagtaaacgatgaatactcgctgtttgcgatatacagtaagcggccaagcgaaagcattaagtattccacctggggagtacgccggcaacggtgaaactcaaaggaattgacgggggcccgcacaagcggaggaacatgtggtttaattcgatgatacgcgaggaaccttacccgggcttaaattgcagtggaatgatgtggaaacatgtcagtgagcaatcaccgctgtgaaggtgctgcatggttgtcgtcagctcgtgccgtgaggtgtcggcttaagtgccataacgagcgcaacccttatcttcagttactaacaggtcatgctgaggactctggagagactgccgtcgtaagatgtgaggaaggtggggatgacgtcaaatcagcacggcccttacgtccggggctacacacgtgttacaatggggggtacagaaggcagctagcgggtgaccgtatgctaatcccaaaatcctctctcagttcggatcgaagtctgcaacccgacttcgtgaagctggattcgctagtaatcgcgcatcagccacggcgcggtgaatacgttcccgggccttgtacacaccgcccgtcaagccatgggagccgggggtacctgaagtacgnaaccgcaag

SEQ ID NO: 138 - DNA, 1390 bp, Blautia massiliensis
  modified_base (17)..(23): a, c, t, g, unknown or other
  modified_base (1373)..(1375): a, c, t, g, unknown or other
tgcagtcgaacgggaannnnnnnattgaagcttcggcagatttagattgtttctagtggcggacgggtgagtaacgcgtgggtaacctgccttgtacagggggataacagtcagaaatgactgctaataccgcataagcgcacagggctgcatggctcggtgtgaaaaactccggtggtataagatggacccgcgttggattagctagttggtgaggtaacggcccaccaaggcgacgatccatagccggcctgagagggtgaacggccacattgggactgagacacggcccagactcctacgggaggcagcagtggggaatattgcacaatgggggaaaccctgatgcagcgacgccgcgtgaaggaagaagtatctcggtatgtaaacttctatcagcagggaagaaaatgacggtacctgactaagaagccccggctaactacgtgccagcagccgcggtaatacgtagggggcaagcgttatccggatttactgggtgtaaagggagcgtagacggatggacaagtctgatgtgaaaggctggggctcaaccccgggactgcattggaaactgcccgtcttgagtgccggagaggtaagcggaattcctagtgtagcggtgaaatgcgtagatattaggaggaacaccagtggcgaaggcggcttactggacggtaactgacgttgaggctcgaaagcgtggggagcaaacaggattagataccctggtagtccacgcggtaaacgatgaatgctaggtgtcggggagcaaagctcttcggtgccgccgcaaacgcattaagcattccacctggggagtacgttcgcaagaatgaaactcaaaggaattgacggggacccgcacaagcggtggagcatgtggtttaattcgaagcaacgcgaagaaccttaccaagtcttgacatcccttctgaccggaacttaaccgttcctttccttcggggcagaggagacaggtggtgcatggttgtcgtcagctcgtgtcgtgagatgttgggttaagtcccgcaacgagcgcaacccctatccccagtagccagcggttcggccgggcactctgaggagactgccagggataacctggaggaaggcggggatgacgtcaaatcatcatgccccttatgatttgggctacacacgtgctacaatggcgtaaacaaagggaagcgaacctgcgagggtgggcaaatcccaaaaataacgtcccagttcggactgtagtctgcaacccgactacacgaagctggaatcgctagtaatcgcggatcagaatgccgcggtgaatacgttcccgggtcttgtacacaccgcccgtcacaccatgggagtcagtaacgcccgaagtcagnnncctaaccgcaaggaa

SEQ ID NO: 139 - DNA, 1387 bp, Bacteroides thetaiotaomicron
  modified_base (1378)..(1378): a, c, t, g, unknown or other
  modified_base (1380)..(1380): a, c, t, g, unknown or other
aggggcagcatttcagtttgcttgcaaactggagatggcgaccggcgcacgggtgagtaacacgtatccaacctgccgataactcggggatagcctttcgaaagaaagattaatacccgatggtataattagaccgcatggtcttgttattaaagaatttcggttatcgatggggatgcgttccattaggcagttggtgaggtaacggctcaccaaaccttcgatggataggggttctgagaggaaggtcccccacattggaactgagacacggtccaaactcctacgggaggcagcagtgaggaatattggtcaatgggcgcaggcctgaaccagccaagtagcgtgaaggatgactgccctatgggttgtaaacttcttttatatgggaataaagttttccacgtgtggaattttgtatgtaccatatgaataaggatcggctaactccgtgccagcagccgcggtaatacggaggatccgagcgttatccggatttattgggtttaaagggagcgtaggtggacagttaagtcagttgtgaaagtttgcggctcaaccgtaaaattgcagttgatactggctgtcttgagtacagtagaggtgggcggaattcgtggtgtagcggtgaaatgcttagatatcacgaagaactccgattgcgaaggcagctcactggactgcaactgacactgatgctcgaaagtgtgggtatcaaacaggattagataccctggtagtccacacagtaaacgatgaatactcgctgtttgcgatatacagtaagcggccaagcgaaagcattaagtattccacctgggggagtacgccggcaacggtgaaactcaaaggaattgacgggggcccgcacaagcggaggaacatgtggtttaattcgatgatacgcgaggaaccttacccgggcttaaattgcatttgaatatattggaaacagtatagtccgtaagacaaatgtgaaggtgctgcatgggttgtcgtcagctcgtgccgtgaggtgtcggcttaagtgccataacgagcgcaacccttatctttagttactaacaggtcatgctgaggactctagagagactgccgtcgtaagatgtgaggaaggtggggatgacgtcaaatcagcacggcccttacgtccggggctacacacgtgttacaatggggggtacagaaggcagctacctggtgacaggatgctaatcccaaaagcctctctcagttcggatcgaagtctgcaacccgacttcgtgaagctggattcgctagtaatcgcgcatcagccatggcgcggtgaatacgttcccgggccttgtacacaccgcccgtcaagccatgaaagccgggggtacctgaagtacgtaancncaaggag

SEQ ID NO: 140 - DNA, 1414 bp, Phascolarctobacterium faecium
  modified_base (1407)..(1407): a, c, t, g, unknown or other
gcagtcgaacggagaattttatttcggtagaattcttagtggcgaacgggtgagtaacgcgtaggcaacctgccctttagacggggacaacattccgaaaggagtgctaataccggatgtgatcatcttgccgcatggcaggatgaagaaagatggcctctacaagtaagctatcgctaaaggatgggcctgcgtctgattagctagttggtagtgtaacggactaccaaggcgatgatcagtagccggtctgagaggatgaacggccacattgggactgagacacggcccaaactcctacgggaggcagcagtggggaatcttccgcaatggacgaaagtctgacggagcaacgccgcgtgagtgatgaaggatttcggtctgtaaagctctgttgtttatgacgaacgtgcagtgtgtgaacaatgcattgcaatgacggtagtaaacgaggaagccacggctaactacgtgccagcagccgcggtaatacgtaggtggcgagcgttgtccggaattattgggcgtaaagagcatgtaggcggcttaataagtcgagcgtgaaaatgcggggctcaaccccgtatggcgctggaaactgttaggcttgagtgcaggagaggaaaggggaattcccagtgtagcggtgaaatgcgtagatattgggaggaacaccagtggcgaaggcgcctttctggactgtgtctgacgctgagatgcgaaagccagggtagcgaacgggattagataccccggtagtcctggccgtaaacgatgggtactaggtgtaggaggtatcgaccccttctgtgccggagttaacgcaataagtaccccgcctggggagtacggccgcaaggttgaaactcaaaggaattgacgggggcccgcacaagcggtggagtatgtggtttaattcgacgcaacgcgaagaaccttaccaaggcttgacattgattgaacgctctagagatagagctttcccttcggggacaagaaaacaggtggtgcatggctgtcgtcagctcgtgtcgtgagatgttgggttaagtcccgcaacgagcgcaacccctatcctatgttaccagcaagtaaagttggggactcatgggagactgccagggacaacctggaggaaggcggggatgacgtcaagtcatcatgccccttatgtcttgggctacacacgtactacaatggtcggaaacagagggaagcgaagccgcgaggcagagcaaaccccagaaacccgatctcagttcggatcgcaggctgcaacccgcctgcgtgaagtcggaatcgctagtaatcgcaggtcagcatactgcggtgaatacgttcccgggccttgtacacaccgcccgtcacaccacgaaagttggtaacacccgaagccggtgaggtaanctattag

SEQ ID NO: 141 - DNA, 1406 bp, Phascolarctobacterium faecium
  modified_base (31)..(31): a, c, t, g, unknown or other
  modified_base (558)..(558): a, c, t, g, unknown or other
  modified_base (920)..(920): a, c, t, g, unknown or other
  modified_base (956)..(956): a, c, t, g, unknown or other
  modified_base (1182)..(1182): a, c, t, g, unknown or other
tgcagtcgaacggagaattttatttcggtanaattcttagtggcgaacgggtgagtaacgcgtaggcaacctgccctttagacggggacaacattccgaaaggagtgctaataccggatgtgatcatcttgccgcatggcaggatgaagaaagatggcctctacaagtaagctatcgctaaaggatgggcctgcgtctgattagctagttggtagtgtaacggactaccaaggcgatgatcagtagccggtctgagaggatgaacggccacattgggactgagacacggcccaaactcctacgggaggcagcagtggggaatcttccgcaatggacgaaagtctgacggagcaacgccgcgtgagtgatgaaggatttcggtctgtaaagctctgttgtttatgacgaacgtgcagtgtgtgaacaatgcattgcaatgacggtagtaaacgaggaagccacggctaactacgtgccagcagccgcggtaatacgtaggtggcgagcgttgtccggaattattgggcgtaaagagcatgtaggcggcttaataagtcnagcgtgaaaatgcggggctcaaccccgtatggcgctggaaactgttaggcttgagtgcaggagaggaaaggggaattcccagtgtagcggtgaaatgcgtagatattgggaggaacaccagtggcgaaggcgcctttctggactgtgtctgacgctgagatgcgaaagccagggtagcgaacgggattagataccccggtagtcctggccgtaaacgatgggtactaggtgtaggaggtatcgaccccttctgtgccggagttaacgcaataagtaccccgcctggggagtacggccgcaaggttgaaactcaaaggaattgacgggggcccgcacaagcggtggagtatgtggtttaattngacgcaacgcgaagaaccttaccaaggcttgacatngattgaacgctctagagatagagctttcccttcggggacaagaaaacaggtggtgcatggctgtcgtcagctcgtgtcgtgagatgttgggttaagtcccgcaacgagcgcaacccctatcctatgttaccagcaagtaaagttggggactcatgggagactgccagggacaacctggaggaaggcggggatgacgtcaagtcatcatgccccttatgtcttgggntacacacgtactacaatggtcggaaacagagggaagcgaagccgcgaggcagagcaaaccccagaaacccgatctcagttcggatcgcaggctgcaacccgcctgcgtgaagtcggaatcgctagtaatcgcaggtcagcattctgcggtgaatacgttcccgggccttgtacacaccgcccgtcacaccacgaaagttggtaacacccgaagccggtgaggta

SEQ ID NO: 142 - DNA, 1380 bp, Clostridium fessum
  modified_base (47)..(47): a, c, t, g, unknown or other
  modified_base (1377)..(1377): a, c, t, g, unknown or other
tgcagtcgaacgaagcaatttagcggaagttttcggatggaagctangattgactgagtggcggacgggtgagtaacgcgtgggtaacctgcctcacactgggggacaacagttagaaatgactgctaataccgcataagcgcacaggaccgcatggtccggtgtgaaaaactccggtggtgtgagatggacccgcgtttgattagctggttggtggggtaacggcctaccaaggcgacgatcaatagccgacctgagagggtgaccggccacattgggactgagacacggcccaaactcctacgggaggcagcagtggggaatattgcacaatgggggaaaccctgatgcagcgacgccgcgtgagtgaagaagtatttcggtatgtaaagctctatcagcagggaagaaaatgacggtacctgactaagaagccccggctaactacgtgccagcagccgcggtaatacgtagggggcaagcgttatccggatttactgggtgtaaagggagcgtagacggtaaagcaagtctgaagtgaaagcccggggctcaaccccgggactgctttggaaactgtttaactagagtgctggagaggtaagcggaattcctagtgtagcggtgaaatgcgtagatattaggaggaacaccagtggcgaaggcggcttactggacagtaactgacgttgaggctcgaaagcgtggggagcaaacaggattagataccctggtagtccacgccgtaaacgatgaatactaggtgttgggggacaaagtccttcggtgccgtcgcaaacgcaataagtattccacctggggagtacgttcgcaagaatgaaactcaaaggaattgacggggacccgcacaagcggtggagcatgtggtttaattcgaagcaacgcgaagaaccttaccaaatcttgacatccctctgaccggcgagtaatgtcgcctttccttcgggacagaggagacaggtggtgcatggttgtcgtcagctcgtgtcgtgagatgttgggttaagtcccgcaacgagcgcaacccttatcctaagtagccagcagttcggctgggcactcttgggagactgccagggataacctggaggaaggtggggatgacgtcaaatcatcatgccccttatgatttgggctacacacgtgctacaatggcgtaaacaaagagaggcgagaccgcgaggtggagcaaatctcaaaaataacgtctcagttcggactgcaggctgcaactcgcctgcacgaagctggaatcgctagtaatcgcgaatcagaatgtcgcggtgaatacgttcccgggtcttgtacacaccgcccgtcacaccatgggagtcagtaatgcccgaagtcagtgancca

SEQ ID NO: 143 - DNA, 1388 bp, Parabacteroides merdae
tgcaagtcgaggggcagcacagggtagcaatacttgggtggcgaccggcgcacgggtgagtaacgcgtatgcaacttacctatcagagggggatagcccggcgaaagtcggattaataccccatgaaacaggggtcccgcatgggaatatttgttaaagattcatcgctgatagataggcatgcgttccattaggcagttggcggggtaacggcccaccaaaccgacgatggataggggttctgagaggaaggtcccccacattggtactgagacacggaccaaactcctacgggaggcagcagtgaggaatattggtcaatggccgagaggctgaaccagccaagtcgcgtgaaggaagaaggatctatggtttgtaaacttcttttataggggaataaagtggaggacgtgtccttttttgtatgtaccctatgaataagcatcggctaactccgtgccagcagccgcggtaatacggaggatgcgagcgttatccggatttattgggtttaaagggtgcgtaggtggtgatttaagtcagcggtgaaagtttgtggctcaaccataaaattgccgttgaaactgggttacttgagtgtgtttgaggtaggcggaatgcgtggtgtagcggtgaaatgcatagatatcacgcagaactccgattgcgaaggcagcttactaaaccataactgacactgaagcacgaaagcgtggggatcaaacaggattagataccctggtagtccacgcagtaaacgatgattactaggagtttgcgatacaatgtaagctctacagcgaaagcgttaagtaatccacctggggagtacgccggcaacggtgaaactcaaaggaattgacgggggcccgcacaagcggaggaacatgtggtttaattcgatgatacgcgaggaaccttacccgggtttgaacgtagtctgaccggagtggaaacactttttctagcaatagcagattacgaggtgctgcatggttgtcgtcagctcgtgccgtgaggtgtcggcttaagtgccataacgagcgcaacccttatcactagttactaacaggtgaagctgaggactctggtgagactgccagcgtaagctgtgaggaaggtggggatgacgtcaaatcagcacggcccttacatccggggcgacacacgtgttacaatggcatggacaaagggcagctacctggcgacaggatgctaatctccaaaccatgtctcagttcggatcggagtctgcaactcgactccgtgaagctggattcgctagtaatcgcgcatcagccatggcgcggtgaatacgttcccgggccttgtacacaccgcccgtcaagccatgggagccgggggtacctgaagtccgtaaccgcaag

SEQ ID NO: 144 - DNA, 1403 bp, Unknown
  Description of Unknown: Holdemanella biformis sequence
  modified_base (2)..(2): a, c, t, g, unknown or other
  modified_base (7)..(7): a, c, t, g, unknown or other
cntgcangtcgaacgagaggagggaaagcttgcttttctgaatctagtggcgaacgggtgagtaacacgtaggtaacctgcccatgtgcccgggataacttctggaaacggatgctaaaaccggataggtagcagacaagcatttgactgctattaaagtggccttggccatgaacatggatggacctgcggtgcattagctggttggtgaggtaacggcccaccaaggcgacgatgcatagccggcctgagagggcggacggccacattgggactgagacacggcccaaactcctacgggaggcagcagtagggaattttcgtcaatggggggaaccctgaacgagcaatgccgcgtgagtgaggaaggtcttcggatcgtaaagctctgttgtaagagaaaaacggcactcatagggaatgatgagtgagtgatggtatcttaccagaaagtcacggctaactacgtgccagcagccgcggtaatacgtaggtggcgagcgttatccggaatgattgggcgtaaagggtgcgtaggtggcagatcaagtctggagtaaaaggtatgggctcaacccgtactggctctggaaactgatcagctagagaacagaagaggacggcggaactccatgtgtagcggtaaaatgcgtagatatatggaagaacaccggtggcgaaggcggccgtctggtctggattctgacactgaagcacgaaagcgtggggagcaaataggattagataccctagtagtccacgccgtaaacgatgagaactaggtgttgggggaataactcagtgccgcagttaacgcagtaagttctccgcctggggagtatgcacgcaagtgtgaaactcaaaggaattgacgggggcccgcacaagcggtggagtatgtggtttaattcgaagcaacgcgaagaaccttaccaggccttgacatcccttgcagaggtatagagatatatccgaggttatcaaggagacaggtggtgcatggttgtcgtcagctcgtgtcgtgagatgttgggttaagtcccgcaacgagcgcaacccttgtgatatgttactaacattgagttgaggactcatatcagactgccggtgataaaccggaggaaggtggggatgacgtcaaatcatcatgccccttatggcctgggctacacacgtactacaatggcgtctacaaagagcggcaagcctgtgaaggcaagcgaatctcataaaggacgtctcagttcggattgaagtctgcaacccgacttcatgaagctggaatcgctagtaatcgcgaatcagcatgtcgcggtgaatacgttctcgggccttgtacacaccgcccgtcaaaccatgggagttggtaatgcccgaagccggtggcataacccttcggggag

SEQ ID NO: 145 - DNA, 1230 bp, Bifidobacterium adolescentis
  modified_base (1)..(9): a, c, t, g, unknown or other
  modified_base (22)..(22): a, c, t, g, unknown or other
  modified_base (880)..(880): a, c, t, g, unknown or other
  modified_base (943)..(944): a, c, t, g, unknown or other
  modified_base (952)..(954): a, c, t, g, unknown or other
  modified_base (973)..(973): a, c, t, g, unknown or other
  modified_base (980)..(980): a, c, t, g, unknown or other
  modified_base (983)..(983): a, c, t, g, unknown or other
  modified_base (990)..(990): a, c, t, g, unknown or other
  modified_base (1014)..(1014): a, c, t, g, unknown or other
  modified_base (1016)..(1016): a, c, t, g, unknown or other
  modified_base (1037)..(1037): a, c, t, g, unknown or other
  modified_base (1053)..(1058): a, c, t, g, unknown or other
  modified_base (1060)..(1061): a, c, t, g, unknown or other
  modified_base (1068)..(1069): a, c, t, g, unknown or other
  modified_base (1071)..(1072): a, c, t, g, unknown or other
  modified_base (1075)..(1077): a, c, t, g, unknown or other
  modified_base (1090)..(1092): a, c, t, g, unknown or other
  modified_base (1096)..(1097): a, c, t, g, unknown or other
  modified_base (1101)..(1104): a, c, t, g, unknown or other
  modified_base (1114)..(1114): a, c, t, g, unknown or other
  modified_base (1116)..(1116): a, c, t, g, unknown or other
  modified_base (1122)..(1123): a, c, t, g, unknown or other
  modified_base (1132)..(1132): a, c, t, g, unknown or other
  modified_base (1134)..(1138): a, c, t, g, unknown or other
  modified_base (1146)..(1147): a, c, t, g, unknown or other
  modified_base (1149)..(1151): a, c, t, g, unknown or other
  modified_base (1156)..(1157): a, c, t, g, unknown or other
  modified_base (1159)..(1159): a, c, t, g, unknown or other
  modified_base (1162)..(1162): a, c, t, g, unknown or other
  modified_base (1164)..(1176): a, c, t, g, unknown or other
  modified_base (1178)..(1182): a, c, t, g, unknown or other
  modified_base (1184)..(1185): a, c, t, g, unknown or other
  modified_base (1187)..(1196): a, c, t, g, unknown or other
  modified_base (1199)..(1200): a, c, t, g, unknown or other
  modified_base (1204)..(1205): a, c, t, g, unknown or other
  modified_base (1207)..(1210): a, c, t, g, unknown or other
  modified_base (1212)..(1214): a, c, t, g, unknown or other
  modified_base (1216)..(1222): a, c, t, g, unknown or other
  modified_base (1224)..(1228): a, c, t, g, unknown or other
  modified_base (1230)..(1230): a, c, t, g, unknown or other
nnnnnnnnnagtcgaacgggancccaggagcttgctcctgggtgagagtggcgaacgggtgagtaatgcgtgaccgacctgccccatacaccggaatagctcctggaaacgggtggtaatgccggatgctccagttggatgcatgtccttctgggaaagattcatcggtatgggatggggtcgcgtcctatcagcttgatggcggggtaacggcccaccatggcttcgacgggtagccggcctgagagggcgaccggccacattgggactgagatacggcccagactcctacgggaggcagcagtggggaatattgcacaatgggcgcaagcctgatgcagcgacgccgcgtgcgggatgacggccttcgggttgtaaaccgcttttgactgggagcaagcccttcggggtgagtgtacctttcgaataagcaccggctaactacgtgccagcagccgcggtaatacgtagggtgcaagcgttatccggaattattgggcgtaaagggctcgtaggcggttcgtcgcgtccggtgtgaaagtccatcgcttaacggtggatccgcgccgggtacgggcgggcttgagtgcggtaggggagactggaattcccggtgtaacggtggaatgtgtagatatcgggaagaacaccaatggcgaaggcaggtctctgggccgtcactgacgctgaggagcgaaagcgtggggagcgaacaggattagataccctggtagtccacgccgtaaacggtggatgctggatgtggggaccattccacggtctccgtgtcggagccaacgcgttaagcatcccgcctggggagtacggccgcaaggctaaaactcaaagaaattgacgggggcccgcacaagcggcggancatgcggattaattcgatgcaacgcgaagaaccttacctgggcttgacatgttcccgacagcnntagagatnnngtctcccttcggggcgggntcacagnggngcatggncgtcgtcagctcgtgtcgtgagangntgggttaagtcccgcaacgancgcaaccctcgccctnnnnnncnncacgtcnngnnggnnntcacgggggaccnnngggnnactnnnnaaggtggggntnacgtcnnatcatcatncnnnnncgtcaggnntnnncgcanncnacnannnnnnnnnnnnngnnnnngnnannnnnnnnnnccnnaacnngnnnncnnntnnnnnnntnnnnnan

SEQ ID NO: 146 - DNA, 1347 bp, Blautia faecis
atttaatttatttctagtggcggacgggtgagtaacgcgtgggtaacctgccttatactgggggataacagccagaaatgactgctaataccgcataagcgcacagaaccgcatggttcggtgtgaaaaactccggtggtataagatggacccgcgttggattagctagttggcagggcagcggcctaccaaggcgacgatccatagccggcctgagagggtgaacggccacattgggactgagacacggcccagactcctacgggaggcagcagtggggaatattgcacaatgggggaaaccctgatgcagcgacgccgcgtgaaggaagaagtatctcggtatgtaaacttctatcagcagggaagataatgacggtacctgactaagaagccccggctaactacgtgccagcagccgcggtaatacgtagggggcaagcgttatccggatttactgggtgtaaagggagcgtagacggcgcagcaagtctgatgtgaaaggcaggggcttaacccctggactgcattggaaactgctgtgcttgagtgccggaggggtaagcggaattcctagtgtagcggtgaaatgcgtagatattaggaggaacaccagtggcgaaggcggcttactggacggtaactgacgttgaggctcgaaagcgtggggagcaaacaggattagataccctggtagtccacgccgtaaacgatgaatactaggtgtctgggagcacagctctttaggtgccgccgcaaacgcattaagtattccacctggggagtacgttcgcaagaatgaaactcaaaggaattgacggggacccgcacaagcggtggagcatgtggtttaattcgaagcaacgcgaagaaccttaccaaatcttgacatccctctgaccgggacttaaccgtccctttccttcgggacaggggagacaggtggtgcatggttgtcgtcagctcgtgtcgtgagatgttgggttaagtcccgcaacgagcgcaacccctatccttagtagccagcacgtaatggtgggcactctgaggagactgccagggataacctggaggaaggcggggatgacgtcaaatcatcatgccccttatgatttgggctacacacgtgctacaatggcgtaaacaaagggaagcgaacccgcgagggtgggcaaatctcaaaaataacgtcccagttcggactgcagtctgcaactcgactgcacgaagctggaatcgctagtaatcgcggatcagaatgccgcggtgaatacgttcccgggtcttgtacacaccgcccgtcacaccatgggagtcagtaacgcccgaagtcagtgacctaaccgca

SEQ ID NO: 147 - DNA, 1392 bp, Clostridium bolteae
  modified_base (9)..(10): a, c, t, g, unknown or other
tgcagtcgnncgaagcaattaaaatgaagttttcggatggatttttgattgactgagtggcggacgggtgagtaacgcgtggataacctgcctcacactgggggataacagttagaaatgactgctaataccgcataagcgcacagtaccgcagggtacggtgtgaaaaactccggtggtgtgagatggatccgcgtctgattagccagttggcggggtaacggcccaccaaagcgacgatcagtagccgacctgagagggtgaccggccacattgggactgagacacggcccaaactcctacgggaggcagcagtggggaatattgcacaatgggcgaaagcctgatgcagcgacgccgcgtgagtgaagaagtatttcggtatgtaaagctctatcagcagggaagaaaatgacggtacctgactaagaagccccggctaactacgtgccagcagccgcggtaatacgtagggggcaagcgttatccggatttactgggtgtaaagggagcgtagacggcgaagcaagtctgaagtgaaaacccagggctcaaccctgggactgctttggaaactgttttgctagagtgtcggagaggtaagtggaattcctagtgtagcggtgaaatgcgtagatattaggaggaacaccagtggcgaaggcggcttactggacgataactgacgttgaggctcgaaagcgtggggagcaaacaggattagataccctggtagtccacgccgtaaacgatgaatgctaggtgttggggggcaaagcccttcggtgccgtcgcaaacgcagtaagcattccacctggggagtacgttcgcaagaatgaaactcaaaggaattgacggggacccgcacaagcggtggagcatgtggtttaattcgaagcaacgcgaagaaccttaccaagtcttgacatcctcttgaccggcgtgtaacggcgccttcccttcggggcaagagagacaggtggtgcatggttgtcgtcagctcgtgtcgtgagatgttgggttaagtcccgcaacgagcgcaacccttatccttagtagccagcaggtaaagctgggcactctagggagactgccagggataacctggaggaaggtggggatgacgtcaaatcatcatgccccttatgatttgggctacacacgtgctacaatggcgtaaacaaagggaagcaagacagtgatgtggagcaaatcccaaaaataacgtcccagttcggactgtagtctgcaacccgactacacgaagctggaatcgctagtaatcgcgaatcagaatgtcgcggtgaatacgttcccgggtcttgtacacaccgcccgtcacaccatgggagtcagcaacgcccgaagtcagtgacccaactcgcaagaga

SEQ ID NO: 148 - DNA, 1393 bp, Oscillibacter sp.
  modified_base (4)..(5): a, c, t, g, unknown or other
  modified_base (24)..(26): a, c, t, g, unknown or other
  modified_base (46)..(46): a, c, t, g, unknown or other
  modified_base (55)..(55): a, c, t, g, unknown or other
  modified_base (1384)..(1384): a, c, t, g, unknown or other
  modified_base (1387)..(1389): a, c, t, g, unknown or other
tacnntgcagtcgaacggagcgcnnnggaatgaggattcggccaanggaaatggntgcttagtggcggactggtgagtaacgcgtgaggaacctgcctttcagagggggacaacagttggaaacgactgctaataccgcatgaagcatgaccggggcatcccggacatgccaaagatttatcgctgaaagatggcctcgcgtccgattagatagttggcggggtaacggcccaccaagtcgacgatcggtagccggactgagaggttggccggccacattgggactgagatacggcccagactcctacgggaggcagcagtggggaatattgggcaatggacgcaagtctgacccagcaacgccgcgtgaaggaagaaggctttcgggttgtaaacttctttgacaggggaagagcagaagacggtaccctgaaaacaagccacggctaactacgtgccagcagccgcggtaatacgtaggtggcaagcgttgtccggatttactgggtgtaaagggcgtgcagccgggccgacaagtcagatgtgaaatcccgaggcttaacctcggaactgcatttgaaactgttggtcttgagtatcggagaggtcatcggaattccttgtgtagcggtgaaatgcgtagatataaggaagaacaccagtggcgaaggcggatgactggacgacaactgacggtgaggcgcgaaagcgtggggagcgaacaggattagataccctggtagtccacgctgtaaacgatggatactaggtgtgcggggactgaccccctgcgtgccgcagttaacacaataagtatcccacctggggagtacgatcgcaaggttgaaactcaaaggaattgacgggggcccgcacaagcggtggattatgtggtttaattcgaagcaacgcgaagaaccttaccagggcttgacatcctactaacgaaacagagatgtatcaggtgcccttcggggaaagtagagacaggtggtgcatggttgtcgtcagctcgtgtcgtgagatgttgggttaagtcccgcaacgagcgcaacccctattgttagttgctacgcaagagcactctagcgagactgccgttgacaaaacggaggaaggtggggacgacgtcaaatcatcatgccccttatgtcctgggctacacacgtaatacaatggcggtcaacagagggaggcaaagccgcgaggcagagcgaatccctaaaagccgtcccagttcggattgcaggctgcaactcgcctgtatgaagtcggaatcgctagtaatcgcggatcagcatgccgcggtgaatacgttcccgggccttgtacacaccgcccgtcacaccatgagagtcgggaacacccgaagtccgtagcctanccnnnagga

SEQ ID NO: 149 - DNA, 1393 bp, Unknown
  Description of Unknown: Monoglobus pectinilyticus sequence
tgcagtcgagcgagaaatttttaacggattccttcggggagaagataaggatggaaagcggcggacgggtgagtaacgcgtgagtaacctgcctttaggagggggacaacattccgaaagggatgctaataccgcataaaattattgtatcgcatggtatgataatcaaagatttatcgcctaaagatggactcgcgtccgattagctagttggtggggtaaaagcctaccaaggcgacgatcggtagccgaactgagaggttgatcggccacattgggactgagacacggcccagactcctacgggaggcagcagtgggggatattgcgcaatgggggaaaccctgacgcagcaacgccgcgtgaaggaagaaggccttcgggttgtaaacttctttaagtgtggaagataatgacggtacacacagaataagccacggctaactacgtgccagcagccgcggtaatacgtaggtggcaagcgttgtccggatttactgggtgtaaagggcgtgtaggcgggtagacaagtcagatgtgaaataccggggctcaactccggggctgcatttgaaactgtatatcttgagtgtcggagaggaaagcggaattcctagtgtagcggtgaaatgcgtagatattaggaggaacaccagtggcgaaggcggctttctggacgataactgacgctgaggcgcgaaagcgtggggagcaaacaggattagataccctggtagtccacgccgtaaacgatggatactaggtgtaggaggtatcgaccccttctgtgccgcagttaacacaataagtatcccacctggggagtacggtcgcaagattgaaactcaaaggaattgacgggggcccgcacaagcagtggagtatgtggtttaattcgaagcaacgcgaagaaccttaccaggacttgacatcccacgcatagcctagagataggtgaagtcctacgggacgtggagacaggtggtgcatggttgtcgtcagctcgtgtcgtgagatgttgggttaagtcccgcaacgagcgcaacccttactgtcagttaccatcattaagttggggactctggcaggactgccggtgacaaatcggaggaaggtggggacgacgtcaaatcatcatgccccttatgtcctgggctacacacgtactacaatggctgtaaacagagtgaagcaaagcagtgatgtggagcaaaacacaaaaagcagtctcagttcagattgtaggctgaaactcgcctatatgaagtcggaattgctagtaatcgcagatcagcatgctgcggtgaatacgttcccgggccttgtacacaccgcccgtcacaccatgagagtcgataacacccgaagcctgtagcttaaccttagggagagc

SEQ ID NO: 150 - DNA, 1389 bp, Unknown
  Description of Unknown: Lachnospiraceae sp. FBI00033 sequence
  modified_base (19)..(22): a, c, t, g, unknown or other
  modified_base (945)..(945): a, c, t, g, unknown or other
  modified_base (1375)..(1375): a, c, t, g, unknown or other
  modified_base (1377)..(1377): a, c, t, g, unknown or other
tgcagtcgaacgaggtatnnnngattgaagttttcggatggatttcaagataccgagtggcggacgggtgagtaacgcgtgggtaacctgcctcatacagggggataacggttagaaatgactgctaataccgcataagcgcacagtaccgcatggtacggtgtgaaaaactccggtggtatgagatggacccgcgtctgattagctggttggtggggtaacggcccaccaaggcgacgatcagtagccgacctgagagggtgaccggccacattgggactgagacacggcccagactcctacgggaggcagcagtgggggatattgcacaatggaggaaactctgatgcagcgacgccgcgtgagtgaagaagtatttcggtatgtaaagctctatcagcagggaagaaaatgacggtacctgactaagaagccccggctaactacgtgccagcagccgcggtaatacgtagggggcaagcgttatccggatttactgggtgtaaagggagcgtagacggcgacgcaagtctgaagtgaaatacccgggctcaacctgggaactgctttggaaactgtgttgctagagtgctggagaggtaagcggaattcctagtgtagcggtgaaatgcgtagatattaggaagaacaccagtggcgaaggcggcttactggacagtaactgacgttgaggctcgaaagcgtggggagcaaacaggattagataccctggtagtccacgccgtaaacgatgaatactaggtgttggtgagcaaagctcatcggtgccgccgcaaacgcaataagtattccacctggggagtacgttcgcaagaatgaaactcaaaggaattgacggggacccgcacaagcggtggagcatgtggtttaattcgaagcaacgcgaagaaccttaccaaatcttgacatccctctgaaaagtcnttaatcggactcctccttcgggacagaggtgacaggtggtgcatggttgtcgtcagctcgtgtcgtgagatgttgggttaagtcccgcaacgagcgcaacccctattgtcagtagccagcaggtaaagctgggcactctgatgagactgccagggataacctggaggaaggtggggatgacgtcaaatcatcatgccccttatgatttgggctacacacgtgctacaatggcgtaaacaaagagaagcgagcctgtgagggggagcaaatctcaaaaataacgtctcagttcggattgtagtctgcaactcgactacatgaagctggaatcgctagtaatcgcagatcagaatgctgcggtgaatacgttcccgggtcttgtacacaccgcccgtcacaccatgggagtcggaaatgcccgaagccagtnanccaagcgaaagc

SEQ ID NO: 151 - DNA, 1178 bp, Clostridium aldenense
  modified_base (2)..(16): a, c, t, g, unknown or other
  modified_base (18)..(22): a, c, t, g, unknown or other
  modified_base (24)..(27): a, c, t, g, unknown or other
  modified_base (29)..(31): a, c, t, g, unknown or other
  modified_base (33)..(35): a, c, t, g, unknown or other
  modified_base (37)..(49): a, c, t, g, unknown or other
  modified_base (52)..(66): a, c, t, g, unknown or other
  modified_base (68)..(68): a, c, t, g, unknown or other
  modified_base (71)..(71): a, c, t, g, unknown or other
  modified_base (75)..(76): a, c, t, g, unknown or other
  modified_base (78)..(81): a, c, t, g, unknown or other
  modified_base (83)..(83): a, c, t, g, unknown or other
  modified_base (86)..(86): a, c, t, g, unknown or other
  modified_base (88)..(93): a, c, t, g, unknown or other
  modified_base (97)..(102): a, c, t, g, unknown or other
  modified_base (104)..(107): a, c, t, g, unknown or other
  modified_base (111)..(111): a, c, t, g, unknown or other
  modified_base (117)..(119): a, c, t, g, unknown or other
  modified_base (122)..(126): a, c, t, g, unknown or other
  modified_base (129)..(130): a, c, t, g, unknown or other
  modified_base (134)..(139): a, c, t, g, unknown or other
  modified_base (143)..(143): a, c, t, g, unknown or other
  modified_base (148)..(149): a, c, t, g, unknown or other
  modified_base (151)..(151): a, c, t, g, unknown or other
  modified_base (155)..(156): a, c, t, g, unknown or other
  modified_base (162)..(162): a, c, t, g, unknown or other
  modified_base (164)..(166): a, c, t, g, unknown or other
  modified_base (172)..(175): a, c, t, g, unknown or other
  modified_base (177)..(177): a, c, t, g, unknown or other
  modified_base (194)..(194): a, c, t, g, unknown or other
  modified_base (209)..(209): a, c, t, g, unknown or other
  modified_base (211)..(211): a, c, t, g, unknown or other
  modified_base (214)..(214): a, c, t, g, unknown or other
  modified_base (216)..(216): a, c, t, g, unknown or other
  modified_base (234)..(234): a, c, t, g, unknown or other
  modified_base (261)..(261): a, c, t, g, unknown or other
  modified_base (718)..(719): a, c, t, g, unknown or other
  modified_base (1160)..(1160): a, c, t, g, unknown or other
  modified_base (1163)..(1165): a, c, t, g, unknown or other
  modified_base (1173)..(1178): a, c, t, g, unknown or other
cnnnnnnnnnnnnnnncnnnnncnnnntnnnannngnnnnnnnnnnnnntgnnnnnnnnnnnnnnntnctncggnngnnnncngtngnnnnnntgcnnnnnngnnnngccntgatgnnngcnnnnncgnntgannnnnnagtnttctnngntatnntaaagntnnnatcagnnnnangaaaatgaccggtaccngactaagaagccccngnctnantacgtgccagcagccgcnggtaatacgtagggggcaagcgttatncggatttactgggtgtaaagggagcgtagacggcgacgcaagtctggagtgaaagcccggggccccaacccccgggactgctttggaaactgtgctgctggagtgcaggagaggtaagtggaattcctagtgtagcggtgaaatgcgtagatattaggaggaacaccagtggcgaaggcggcttactggactgtaactgacgttgaggctcgaaagcgtggggagcaaacaggattagataccctggtagtccacgccgtaaacgatgaatgctaggtgtcggggggcaaagcccttcggtgccgccgctaacgcaataagcattccacctggggagtacgttcgcaagaatgaaactcaaaggaattgacggggacccgcacaagcggtggagcatgtggtttaattcgaagcaacgcgaagaaccttaccaagtcttgacatccccctgaccggnncgtaacggggcccttccttcgggacaggggagacaggtggtgcatggttgtcgtcagctcgtgtcgtgagatgttgggttaagtcccgcaacgagcgcaacccttatccttagtagccagcacgtgatggtgggcactctagggagactgccagggataacctggaggaaggtggggatgacgtcaaatcatcatgccccttatgatttgggctacacacgtgctacaatggcgtaaacaaagggaggcgaccctgcgaaggcaagcaaatcccaaaaataacgtcccagttcggactgtagtctgcaacccgactacacgaagctggaatcgctagtaatcgcggatcagaatgccgcggtgaatacgttcccgggtcttgtacacaccgcccgtcacaccatgggagtcagcaacgcccgaagtcagtgacccaacctnaannnggagggannnnnn

SEQ ID NO: 152 - DNA, 1429 bp, Dialister invisus
  modified_base (33)..(33): a, c, t, g, unknown or other
  modified_base (35)..(35): a, c, t, g, unknown or other
  modified_base (1426)..(1427): a, c, t, g, unknown or other
tcgaacgaaaagagggaaagagcttgctctttncngaattgagtggcaaacgggtgagtaacacgtaaacaacctgccttcaggatggggacaacagacggaaacgactgctaataccgaataagttccaagagccgcatggcccatggaagaaaaggtggcctctacctgtaagctatcgcctgaagaggggtttgcgtctgattagctggttggaggggtaacggcccaccaaggcgacgatcagtagccggtctgagaggatgaacggccacactggaactgagacacggtccagactcctacgggaggcagcagtggggaatcttccgcaatgggcgaaagcctgacggagcaacgccgcgtgagtgatgacggccttcgggttgtaaaactctgtgatccgggacgaaaaggcagagtgcgaagaacaaactgcattgacggtaccggaaaagcaagccacggctaactacgtgccagcagccgcggtaatacgtaggtggcaagcgttgtccggaattattgggcgtaaagcgcgcgcaggcggcttcccaagtccctcttaaaagtgcggggcttaaccccgtgatgggaaggaaactgggaagctggagtatcggagaggaaagtggaattcctagtgtagcggtgaaatgcgtagagattaggaagaacaccggtggcgaaggcgactttctggacgaaaactgacgctgaggcgcgaaagcgtggggagcaaacaggattagataccctggtagtccacgccgtaaacgatggatactaggtgtaggaggtatcgacccctcctgtgccggagttaacgcaataagtatcccgcctgggaagtacgatcgcaagattaaaactcaaaggaattgacgggggcccgcacaagcggtggagtatgtggtttaattcgacgcaacgcgaagaaccttaccaggtcttgacattgatcgcgatctgcagaaatgcggagttcttcttcggaagacgagaaaacaggtggtgcacggctgtcgtcagctcgtgtcgtgagatgttgggttaagtcccgcaacgagcgcaacccctatcatttgttgccagcacgtaaaggtggggactcaaatgagaccgccgcggacaacgcggaggaaggcggggacgacgtcaagtcatcatgccccttatgacctgggctacacacgtactacaatgggtgtcaacaaagagaagcgaacccgcgagggagagcaaagctcaaaaacacacccccagttcagatcgcaggctgcaacccgcctgcgtgaagtaggaatcgctagtaatcgcgggtcagcataccgcggtgaatacgttcccgggccttgtacacaccgcccgtcacactatgagagtcagaaacacccgaagccggtgaggtaaccgcaaggagccnncc

SEQ ID NO: 153 - DNA, 1421 bp, Dialister succinatiphilus
  modified_base (4)..(4): a, c, t, g, unknown or other
cgancgggaggaaaagagaagcttgcttctttttgaatctagtggcaaacgggtgagtaacacgtaaacaacctgccttcaggatggggacaacagacggaaacgactgctaataccgaatgtgttccggagaccgcatgatttccggaagaaaggatggcctctatttataagctatcgcctgaagaggggtttgcgtctgattaggcagttggtgaggtaacggcccaccaaacctacgatcagtagccggtctgagaggatgaacggccacactggaactgagacacggtccagactcctacgggaggcagcagtggggaatcttccgcaatggacgaaagtctgacggagcaacgccgcgtgagtgatgacggccttcgggttgtaaagctctgtgatcggggacgaatggctggtatgctaataccatatcagagtgacggtacccgaatagcaagccacggctaactacgtgccagcagccgcggtaatacgtaggtggcaagcgttgtccggaattattgggcgtaaagcgcgcgcaggcggcttcttaagtccatcttaaaagtgcggggcttaaccccgtgatgggatggaaactgggaggctggagtatcggagaggaaagtggaattcctagtgtagcggtgaaatgcgtagagattaggaagaacaccggtggcgaaggcgactttctggacgacaactgacgctgaggcgcgaaagcgtggggagcaaacaggattagataccctggtagtccacgccgtaaacgatgaatactaggtgtaggaggtatcgaccccttctgtgccggagctaacacaataagtattccgcctgggaagtacgatcgcaagattaaaactcaaaggaattgacgggggcccgcacaagcggtggagtatgtggtttaattcgacgcaacgcgaagaaccttaccaggtcttgacattgactgcaatcccgagaaatcgggagttcccttcggggacaggaaaacaggtggtgcacggctgtcgtcagctcgtgtcgtgagatgttgggttaagtcccgcaacgagcgcaacccctatcttatgttgccagcacgtaatggtgggaactcatgagagaccgccgcggacaacgcggaggaaggcggggatgacgtcaagtcatcatgccccttatgacctgggctacacacgtactacaatgggtgtcaacaaagagaagcaatggggcgacccggagcaaacctcaaaaacacacccccagttcagattgcaggctgcaacccgcctgcatgaagcaggaatcgctagtaatcgcgggtcagcataccgcggtgaatacgttcccgggccttgtacacaccgcccgtcacactatgagagtcagaaacacccgaagccggtgaggtaaccgtaaggagc

SEQ ID NO: 154 - DNA, 1397 bp, Bacteroides dorei
  modified_base (1396)..(1396): a, c, t, g, unknown or other
gcagtcgaggggcagcatggtcttagcttgctaaggctgatggcgaccggcgcacgggtgagtaacacgtatccaacctgccgtctactcttggccagccttctgaaaggaagattaatccaggatgggatcatgagttcacatgtccgcatgattaaaggtattttccggtagacgatggggatgcgttccattagatagtaggcggggtaacggcccacctagtcaacgatggataggggttctgagaggaaggtcccccacattggaactgagacacggtccaaactcctacgggaggcagcagtgaggaatattggtcaatgggcgatggcctgaaccagccaagtagcgtgaaggatgactgccctatgggttgtaaacttcttttataaaggaataaagtcgggtatgcatacccgtttgcatgtactttatgaataaggatcggctaactccgtgccagcagccgcggtaatacggaggatccgagcgttatccggatttattgggtttaaagggagcgtagatggatgtttaagtcagttgtgaaagtttgcggctcaaccgtaaaattgcagttgatactggatgtcttgagtgcagttgaggcaggcggaattcgtggtgtagcggtgaaatgcttagatatcacgaagaactccgattgcgaaggcagcctgctaagctgcaactgacattgaggctcgaaagtgtgggtatcaaacaggattagataccctggtagtccacacggtaaacgatgaatactcgctgtttgcgatatacggcaagcggccaagcgaaagcgttaagtattccacctggggagtacgccggcaacggtgaaactcaaaggaattgacgggggcccgcacaagcggaggaacatgtggtttaattcgatgatacgcgaggaaccttacccgggcttaaattgcactcgaatgatccggaaacggttcagctagcaatagcgagtgtgaaggtgctgcatggttgtcgtcagctcgtgccgtgaggtgtcggcttaagtgccataacgagcgcaacccttgttgtcagttactaacaggtgatgctgaggactctgacaagactgccatcgtaagatgtgaggaaggtggggatgacgtcaaatcagcacggcccttacgtccggggctacacacgtgttacaatggggggtacagagggccgctaccacgcgagtggatgccaatccctaaaacccctctcagttcggactggagtctgcaacccgactccacgaagctggattcgctagtaatcgcgcatcagccacggcgcggtgaatacgttcccgggccttgtacacaccgcccgtcaagccatgggagccgggggtacctgaagtgcgtaaccgcgaggatcnc

SEQ ID NO: 155 - DNA, 1384 bp, Blautia obeum
  modified_base (22)..(22): a, c, t, g, unknown or other
  modified_base (43)..(43): a, c, t, g, unknown or other
  modified_base (1382)..(1382): a, c, t, g, unknown or other
gcagtcgaacgggaaacctttnattgaagcttcggcagatttngctggtttctagtggcggacgggtgagtaacgcgtgggtaacctgccttatacagggggataacaaccagaaatggttgctaataccgcataagcgcacaggaccgcatggtctggtgtgaaaaactccggtggtataagatggacccgcgttggattagctagttggcagggtaacggcctaccaaggcgacgatccatagccggcctgagagggtgaacggccacattgggactgagacacggcccagactcctacgggaggcagcagtggggaatattgcacaatgggggaaaccctgatgcagcgacgccgcgtgaaggaagaagtatctcggtatgtaaacttctatcagcagggaagatagtgacggtacctgactaagaagccccggctaactacgtgccagcagccgcggtaatacgtagggggcaagcgttatccggatttactgggtgtaaagggagcgtagacggactggcaagtctgatgtgaaaggcgggggctcaacccctggactgcattggaaactgttagtcttgagtgccggagaggtaagcggaattcctagtgtagcggtgaaatgcgtagatattaggaggaacaccagtggcgaaggcggcttactggacggtaactgacgttgaggctcgaaagcgtggggagcaaacaggattagataccctggtagtccacgccgtaaacgatgaatactaggtgttggggagcaaagctcttcggtgccgccgcaaacgcattaagtattccacctggggagtacgttcgcaagaatgaaactcaaaggaattgacggggacccgcacaagcggtggagcatgtggtttaattcgaagcaacgcgaagaaccttaccaagtcttgacatccctctgaccgttccttaaccggaactttccttcgggacagaggagacaggtggtgcatggttgtcgtcagctcgtgtcgtgagatgttgggttaagtcccgcaacgagcgcaacccctatccccagtagccagcagtccggccgggcactctgaggagactgccagggataacctggaggaaggcggggatgacgtcaaatcatcatgccccttatgatttgggctacacacgtgctacaatggcgtaaacaaagggaagcaagcctgcgaaggtaagcaaatcccaaaaataacgtcccagttcggactgcagtctgcaactcgactgcacgaagctggaatcgctagtaatcgcggatcagaatgccgcggtgaatacgttcccgggtcttgtacacaccgcccgtcacaccatgggagtcagtaacgcccgaagtcagtgacctaactgnaa

SEQ ID NO: 156 - DNA, 1262 bp, Enterococcus durans
tgcagtcgtacgcttctttttccccggagcttgctccaccggaaaaagaggagtggcgaacgggtgagtaacacgtgggtaacctgcccatcagaaggggataacacttggaaacaggtgctaataccgtataacaatcgaaaccgcatggttttgatttgaaaggcgctttcgggtgtcgctgatggatggacccgcggtgcattagctagttggtgaggtaacggctcaccaaggccacgatgcatagccgacctgagagggtgatcggccacattgggactgagacacggcccaaactcctacgggaggcagcagtagggaatcttcggcaatggacgaaagtctgaccgagcaacgccgcgtgagtgaagaaggttttcggatcgtaaaactctgttgttagagaagaacaaggatgagagtaactgttcatcccttgacggtatctaaccagaaagccacggctaactacgtgccagcagccgcggtaatacgtaggtggcaagcgttgtccggatttattgggcgtaaagcgagcgcaggcggtttcttaagtctgatgtgaaagccccccggctcaaccggggagggtcattggaaactgggagacttgagtgcagaagaggagagtggaattccctgtgtagcggtgaaatgcgtagatatatggaggaacaccagtggcgaaagcggctctctggtctgttactgacgctgaaggtcgaaagcgtggggagcaaacagggatagataccctggttattcacgccgtaaacgatggagggttagtgttggaagggtttccccctttcatggtgccactaaacccattaacccttcgcctgggggagacgacccgcagggtggaaattcaaaggaattgacgggggcccgcccaaccgggggagcatgtggtttaattggaagcaacgcgaagaaccttaccaggtctggactccctttgaccactctagagatagagcttcccctttcgggggcaaagtgacaggtggtgcatggttgtggtcagctcgtgtcgtgagatgttgggttaagtcccgcaacgagcgcaacccttattgttagttgccatcattcagttgggcactctagcaagactgccggtgacaaaccggaggaaggtggggatgacgtcaaatcatcatgccccttatgacctgggctacacacgtgctacaatgggaagtacaacgagttgcgaagtcgcgaggctaagctaatctcttaaaccttctctc

SEQ ID NO: 157 - DNA, 1376 bp, Unknown
  Description of Unknown: Lachnospiraceae sp. FBI00157 sequence
  modified_base (25)..(28): a, c, t, g, unknown or other
  modified_base (1359)..(1359): a, c, t, g, unknown or other
  modified_base (1375)..(1375): a, c, t, g, unknown or other
tcgaacgaagtttttctttcgggannnncttagtggcggacgggtgagtaacgcgtgggtaacctgccctgtacagggggacaacagctggaaacggctgctaataccgcataagcccttagcactgcatggtgcatagggaaaaggagcaatccggtacaggatggacccgcgtctgattagccagttggcagggtaacggcctaccaaagcgacgatcagtagccgatctgagaggatgtacggccacattgggactgagacacggcccagactcctacgggaggcagcagtggggaatattgcacaatggaggaaactctgatgcagcgacgccgcgtgagtgaagaagtatttcggtatgtaaagctctatcagcagggaagaaaatgacggtacctgactaagaagcaccggctaaatacgtgccagcagccgcggtaatacgtatggtgcaagcgttatccggatttactgggtgtaaagggagcgtaggtggcaaggcaagccagaagtgaaaacccggggctcaaccgcgggattgcttttggaactgtcatgctagagtgcaggaggggtgagcggaattcctagtgtagcggtgaaatgcgtagatattaggaggaacaccggaggcgaaggcggctcactggactgtaactgacactgaggctcgaaagcgtggggagcaaacaggattagataccctggtagtccacgcggtaaacgatgaatactagatgtcgggtagcatagctattcggtgtcgtcgcaaacgcaataagtattccacctggggagtacgttcgcaagaatgaaactcaaaggaattgacggggacccgcacaagcggtggagcatgtggtttaattcgaagcaacgcgaagaaccttacctgctcttgacatcccattcgatagagggtaatgcctctagcccttcgggggaatggagacaggtggtgcatggttgtcgtcagctcgtgtcgtgagatgttgggttaagtcccgcaacgagcgcaacccttattgtcagtagccagcaggtgaagctgggcactctgatgagactgccggggataacccggaggaaggtggggatgacgtcaaatcatcatgccccttatgagcagggctacacacgtgctacaatggcgtaaacagagggaagcgaaggagtgatccggagcaaatctcaaaaataacgtctcagttcggattgtagtctgcaactcgactacatgaagctggaatcgctagtaatcgcagatcagaatgctgcggtgaatacgttcccgggtcttgtacacaccgcccgtcacaccatgggagtcggtaatgcccgaagtcagtgactcanccgaaaggagagagcnc

SEQ ID NO: 158 - DNA, 1387 bp, Butyricimonas sp.
  modified_base (20)..(22): a, c, t, g, unknown or other
  modified_base (32)..(34): a, c, t, g, unknown or other
  modified_base (36)..(37): a, c, t, g, unknown or other
  modified_base (1384)..(1386): a, c, t, g, unknown or other
gcagtcgaggggcagcacgnnntagcaatacnnngnnggcgaccggcgcacgggtgagtaacacgtgtgcaaccaaccccgtaccgggagataacccgcggaaacgtggactaacatcccataatactctaggatcgcatgatctttcatttaaaattccggtggtacgggacgggcacgcgcgacattaggtagttggcggggtaacggcccaccaagccgacgatgtctaggggttctgagaggaaggtcccccacactggaactgagacacggtccagactcctacgggaggcagcagtgaggaatattggtcaatgggcgagagcctgaaccagccaagtcgcgtgagggaagaatggtctatggcctgtaaacctcttttgccagggaagaataaaaggtacgtgtaccttcttgccagtacctgacgaataagcatcggctaactccgtgccagcagccgcggtaatacgggggatgcgagcgttatccggatttattgggtttaaagggcgcgtaggcgggacgccaagtcagcggtaaaagactgcagctaaactgtagcacgccgttgaaactggcgacctggagacgagacgagggaggcggaacaagtgaagtagcggtgaaatgcttagatatcacttggaaccccgatagcgaaggcagcttcccaggctcgatctgacgctgatgcgcgagagcgtgggtagcgaacaggattagataccctggtagtccacgccgtaaacgatgctcactggatcttggcgatacactgccagggttcaagcgaaagtattaagtgagccacctggggagtacgtcggcaacgatgaaactcaaaggaattgacgggggcccgcacaagcggaggaacatgtggtttaattcgatgatacgcgaggaaccttacccgggtttaaatgtagattgcatgaggtggaaacacttcttcccttcggggctatttacaaggtgctgcatggttgtcgtcagctcgtgccgtgaggtgtcgggttaagtcccataacgagcgcaacccctatcgccagttgccagcggctgaggccgggcactctgtcgagactgccaccgtaaggtgcgaggaaggcggggatgacgtcaaatcagcacggcccttacacccggggcgacacacgtgttacaatggccggtacagagggcagccacggggtgacccggagcgaatctctaaagccggtcgtagttcggactggagtctgcaacccgactccacgaagttggattcgctagtaatcgcgcatcagccatggcgcggtgaatacgttcccgggccttgtacacaccgcccgtcaagccatggaagccgggagtacctgaagatcgtgaccgcgannnc

SEQ ID NO: 159 - DNA, 1396 bp, Unknown
  Description of Unknown: Eisenbergiella tayi sequence
  modified_base (1392)..(1393): a, c, t, g, unknown or other
tgcagtcgaacgaagttagacagaggaagttttcggatggaatcggtataacttagtggcggacgggtgagtaacgcgtgggaaacctgccctgtaccgggggataacacttagaaataggtgctaataccgcataagcgcacggaaccgcatggttgtgtgtgaaaaactccggtggtacaggatggtcccgcgtctgattagccagttggcagggtaacggcctaccaaagcgacgatcagtagccggcctgagagggtgaacggccacattgggactgagacacggcccaaactcctacgggaggcagcagtggggaatattgcacaatgggggaaaccctgatgcagcgacgccgcgtgagtgaagaagtatttcggtatgtaaagctctatcagcagggaagaaaatgacggtacctgactaagaagccccggctaactacgtgccagcagccgcggtaatacgtagggggcaagcgttatccggatttactgggtgtaaagggagcgtagacggcatggcaagccagatgtgaaaacccagggctcaaccttgggattgcatttggaactgccaggctggagtgcaggagaggtaagcggaattcctagtgtagcggtgaaatgcgtagatattaggaggaacaccagtggcgaaggcggcttactggactgtaactgacgttgaggctcgaaagcgtggggagcaaacaggattagataccctggtagtccacgcggtaaacgatgattgctaggtgtaggtgggtatggacccatcggtgccgcagctaacgcaataagcaatccacctggggagtacgttcgcaagaatgaaactcaaaggaattgacggggacccgcacaagcggtggagcatgtggtttaattcgaagcaacgcgaagaaccttaccaagtcttgacatccccttgaagatcttgtaaagaggcattcccttcggggcaagggagacaggtggtgcatggttgtcgtcagctcgtgtcgtgagatgttgggttaagtcccgcaacgagcgcaacccttattcttagtagccagcaggtaaagctgggcactctaaggagactgccggggataacccggaggaaggcggggatgacgtcaaatcatcatgccccttatgatttgggctacacacgtgctacaatggcgtaaacaaagggaagcgagacagtgatgtggagcaaatcccagaaataacgtctcagttcggattgtagtctgcaactcgactacatgaagctggaatcgctagtaatcgcgaatcagcatgtcgcggtgaatacgttcccgggtcttgtacacaccgcccgtcacaccatgggagttggaaatgcccgaagtctgtgacctaaccgaaagggannagc

SEQ ID NO: 160 - DNA, 1394 bp, Unknown
  Description of Unknown: Ruminococcaceae sp. FBI00105 FBI00160 sequence
  modified_base (8)..(10): a, c, t, g, unknown or other
  modified_base (25)..(25): a, c, t, g, unknown or other
tgcagtcnnnggaactgctatgaangagttttcggacaacggaatagtatgtttagtggcggacgggtgagtaacgcgtgagtaacctgcctgggagtggggaataacagttggaaacgactgctaataccgcataatgcagcggagtcgcatggctctgctgccaaagatttatcgctcttagatggactcgcgtctgattagctggttggcggggtaacggcccaccaaggcgacgatcagtagccggactgagaggttgaccggccacattgggactgagatacggcccagactcctacgggaggcagcagtggggaatattgggcaatgggcgcaagcctgacccagcaacgccgcgtgaaggaagaaggctttcgggttgtaaacttcttttatgagggacgaaacaaatgacggtacctcatgaataagccacggctaactacgtgccagcagccgcggtaatacgtaggtggcaagcgttatccggatttactgggtgtaaagggcgtgtaggcgggactgcaagtcagatgtgaaaattatgggctcaaccccataacctgcatttgaaactgtagttcttgagtgctggagaggcaatcggaattccgtgtgtagcggtgaaatgcgtagatatacggaggaacaccagtggcgaaggcggattgctggacagtaactgacgctgaggcgcgaaagcgtggggagcaaacaggattagataccctggtagtccacgctgtaaacgatggatactaggtgtgggggggtctgaccccctccgtgccgcagttaacacaataagtatcccacctggggagtacgatcgcaaggttgaaactcaaaggaattgacgggggcccgcacaagcggtggagtatgtggtttaattcgaagcaacgcgaagaaccttaccagggcttgacatcctactaacgaagtagagatacattaggtgcccttcggggaaagtagagacaggtggtgcatggttgtcgtcagctcgtgtcgtgagatgttgggttaagtcccgcaacgagcgcaacccttattgttagttgctacgcaagagcactctagcgagactgccgttgacaaaacggaggaaggtggggacgacgtcaaatcatcatgccccttatgtcctgggccacacacgtactacaatggcggttaacagagggaagcaataccgcgaggtggagcaaatccctaaaagccgtcccagttcggattgcaggctgaaacccgcctgtatgaagttggaatcgctagtaatcgcggatcagcatgccgcggtgaatacgttcccgggccttgtacacaccgcccgtcacaccatgagagtcgggaacacccgaagtccgtagcctaaccgcaaggagggc

SEQ ID NO: 161 - DNA, 1393 bp, Bacteroides cellulosilyticus
  modified_base (3)..(3): a, c, t, g, unknown or other
  modified_base (24)..(24): a, c, t, g, unknown or other
  modified_base (26)..(28): a, c, t, g, unknown or other
  modified_base (963)..(963): a, c, t, g, unknown or other
acncatgcagtcgaggggcagcangnnnctagcaataggttgatggcgaccggcgcacgggtgagtaacacgtatccacctaccggttattccgggatagcctttcgaaagaaagattaataccggatagtataacgagaaggcatctttttgttattaaagaatttcgataaccgatggggatgcgttccattagtttgttggcggggtaacggcccaccaagacatcgatggataggggttctgagaggaaggtcccccacattggaactgagacacggtccaaactcctacgggaggcagcagtgaggaatattggtcaatggacgagagtctgaaccagccaagtagcgtgaaggatgactgccctatgggttgtaaacttcttttatatgggaataaagtgagccacgtgtggctttttgtatgtaccatacgaataaggatcggctaactccgtgcccagcagccgcggtaatacggaggatccgagcgttatccggatttattgggtttaaagggagcgtaggcggactattaagtcagctgtgaaagtttgcggctcaaccgtaaaattgcagttgatactggtcgtcttgagtgcagtagaggtaggcggaattcgtggtgtagcggtgaaatgcttagatatcacgaagaactccgattgcgaaggcagcttactggactgtaactgacgctgatgctcgaaagtgtgggtatcaaacaggattagataccctggtagtccacacagtaaacgatgaatactcgctgtttgcgatatacggcaagcggccaagcgaaagcattaagtattccacctggggagtacgccggcaacggtgaaactcaaaggaattgacgggggcccgcacaagcggaggaacatgtggtttaattcgatgatacgcgaggaaccttacccgggcttaaattgcatctgaataatttggaaacagnttagccgtaaggcagatgtgaaggtgctgcatggttgtcgtcagctcgtgccgtgaggtgtcggcttaagtgccataacgagcgcaacccttatctttagttactaacaggtcatgctgaggactctagagagactgccgtcgtaagatgtgaggaaggtggggatgacgtcaaatcagcacggcccttacgtccggggctacacacgtgttacaatggggggtacagaaggcagctacacagcgatgtgatgctaatcccaaaagcctctctcagttcggattggagtctgcaacccgactccatgaagctggattcgctagtaatcgcgcatcagccacggcgcggtgaatacgttcccgggccttgtacacaccgcccgtcaagccatgaaagccgggggtacctgaagtccgtaaccgtaaggagc

SEQ ID NO: 162 - DNA, 1395 bp, Bifidobacterium catenulatum
  modified_base (15)..(16): a, c, t, g, unknown or other
  modified_base (19)..(19): a, c, t, g, unknown or other
  modified_base (1390)..(1390): a, c, t, g, unknown or other
tgcagtcgaacgggnnccnggcagcttgctgcctggtgagagtggcgaacgggtgagtaatgcgtgaccgacctgccccatacaccggaatagctcctggaaacgggtggtaatgccggatgctccgactcctcgcatggggtgtcgggaaagattatatcggtatgggatggggtcgcgtcctatcaggtagtcggcggggtaacggcccaccgagcctacgacgggtagccggcctgagagggcgaccggccacattgggactgagatacggcccagactcctacgggaggcagcagtggggaatattgcacaatgggcgcaagcctgatgcagcgacgccgcgtgcgggatgacggccttcgggttgtaaaccgcttttgatcgggagcaagccttcgggtgagtgtacctttcgaataagcaccggctaactacgtgccagcagccgcggtaatacgtagggtgcaagcgttatccggaattattgggcgtaaagggctcgtaggcggtttcgtcgcgtccggtgtgaaagtccatcgcttaacggtggatctgcgccgggtacgggcgggctggagtgcggtaggggagactggaattccccggtgtaacggtggaatgtgtagatatcgggaagaacaccaatggcgaaggcaggtctctgggccgttactgacgctgaggagcgaaagcgtggggagcgaacaggattagataccctggtagtccacgccgtaaacggtggatgctggatgtgggggcccgttccacgggttccgtgtcggagctaacgcgttaagcatcccgcctggggagtacggccgcaaggctaaaactcaaagaaattgacgggggcccgcacaagcggcggagcatgcggattaattcgatgcaacgcgaagaaccttacctgggcttgacatgttcccgacagccgtagagatgcggcctcccttcggggcgggttcacaggtggtgcatggtcgtcgtcagctcgtgtcgtgagatgttgggttaagtcccgcaacgagcgcaaccctcgccctgtgttgccagcacgtcatggtgggaactcacgggggaccgccggggtcaactcggaggaaggtggggatgacgtcagatcatcatgccccttacgtccagggcttcacgcatgctacaatggccggtacaacgggatgcgacatggcgacatggagcggatccctgaaaaccggtctcagttcggattggagtctgcaacccgactccatgaaggcggagtcgctagtaatcgcggatcagcaacgccgcggtgaatgcgttcccgggccttgtacacaccgcccgtcaagtcatgaaagtgggtagcacccgaagccggtggcctaaccccttgtggganggagc

SEQ ID NO: 163 - DNA, 1418 bp, Acidaminococcus intestini
tgcagtcgacggagaacttatttcggtaagttcttagtggcgaacgggtgagtaacgcgtgggcaacctgccctccagttggggacaacattccgaaagggatgctaataccgaatgtcctccctcctccgcatggaggagggaggaaagatggcctctgcttgcaagctatcgctggaagatgggcccgcgtctgattagctagttggtggggtaacggctcaccaaggcgatgatcagtagccggtctgagaggatgaacggccacattgggactgagacacggcccaaactcctacgggaggcagcagtggggaatcttccgcaatggacgaaagtctgacggagcaacgccgcgtgagtgatgaaggtcttcggattgtaaaactctgttgttagggacgaaagcaccgtgttcgaacaggtcatggtgttgacggtacctaacgaggaagccacggctaactacgtgccagcagccgcggtaatacgtaggtggcaagcgttgtccggaattattgggcgtaaagagcatgtaggcgggcttttaagtctgacgtgaaaatgcggggcttaaccccgtatggcgttggatactggaagtcttgagtgcaggagaggaaaggggaattcccagtgtagcggtgaaatgcgtagatattgggaggaacaccagtggcgaaggcgcctttctggactgtgtctgacgctgagatgcgaaagccagggtagcaaacgggattagataccccggtagtcctggccgtaaacgatggatactaggtgtaggaggtatcgaccccttctgtgccggagttaacgcaataagtatcccgcctggggactacgatcgcaagattgaaactcaaaggaattgacgggggcccgcacaagcggtggagtatgtggtttaattcgacgcaacgcgaagaaccttaccaaggcttgacattgagtgaaagacctagagataggtccctcccttcggggacacgaaaacaggtggtgcatggctgtcgtcagctcgtgtcgtgagatgttgggttaagtcccgcaacgagcgcaacccctatcctatgttaccagcgcgtaaaggcggggactcataggagactgccagggataacttggaggaaggcggggatgacgtcaagtcatcatgccccttatgtcttgggctacacacgtactacaatggtcggcaacaaagggcagcgaaaccgcgaggtggagcaaatcccagaaacccgaccccagttcggatcgtaggctgcaacccgcctacgtgaagttggaatcgctagtaatcgcaggtcagcatactgcggtgaatacgttcccgggccttgtacacaccgcccgtcacaccacgaaagttggtaacacccgaagccggtgagataaccttttaggagtca

SEQ ID NO: 164 - DNA, 1393 bp, Bacteroides stercoris
  modified_base (4)..(4): a, c, t, g, unknown or other
  modified_base (76)..(76): a, c, t, g, unknown or other
  modified_base (788)..(788): a, c, t, g, unknown or other
tgcngtcgaggggcagcatcatcaaagcttgctttgatggatggcgaccggcgcacgggtgagtaacacgtatccnacctgccgacaacactgggatagcctttcgaaagaaagattaataccggatggcatagttttcccgcatgggataattattaaagaatttcggttgtcgatggggatgcgttccattaggcagttggcggggtaacggcccaccaaaccaacgatggataggggttctgagaggaaggtcccccacattggaactgagacacggtccaaactcctacgggaggcagcagtgaggaatattggtcaatggacgagagtctgaaccagccaagtagcgtgaaggatgactgccctatgggttgtaaacttcttttatacgggaataaagttagccacgtgtggctttttgtatgtaccgtatgaataaggatcggctaactccgtgccagcagccgcggtaatacggaggatccgagcgttatccggatttattgggtttaaagggagcgtaggcgggttgttaagtcagttgtgaaagtttgcggctcaaccgtaaaattgcagttgatactggcgaccttgagtgcaacagaggtaggcggaattcgtggtgtagcggtgaaatgcttagatatcacgaagaactccgattgcgaaggcagcttactggattgtaactgacgctgatgctcgaaagtgtgggtatcaaacaggattagataccctggtagtccacacagtaaacgatgaatactcgctgttggcgatatacnggtcagcggccaagcgaaagcattaagtattccacctgggggagtacgccggcaacggtgaaactcaaaggaattgacgggggcccgcacaagcggaggaacatgtggtttaattcgatgatacgcgaggaaccttacccgggcttaaattgcaactgactgaaccggaaacggttctttcttcggacagttgtgaaggtgctgcatggttgtcgtcagctcgtgccgtgaggtgtcggcttaagtgccataacgagcgcaacccttatcgatagttactagcaggtcatgctgaggactctattgagactgccgtcgtaagatgtgaggaaggtggggatgacgtcaaatcagcacggcccttacgtccggggctacacacgtgttacaatggggggtacagaaggcagctacacggcgacgtggtgctaatccctaaagcctctctcagttcggattggagtctgcaacccgactccatgaagctggattcgctagtaatcgcgcatcagccacggcgcggtgaatacgttcccgggccttgtacacaccgcccgtcaagccatgaaagccgggggtacctgaagtacgtaaccgcgaggagc

SEQ ID NO: 165 - DNA, 1384 bp, Bacteroides massiliensis
tcgaggggcagcatggtcttagcttgctaaggccgatggcgaccggcgcacgggtgagtaacgcgtatccaacctgccttacactcttggacagccttctgaaagggagattaatacaagatgttatcatgagtaagcattttcgcatgattaaaggtttaccggtgtaagatggggatgcgttccattagatagtaggcggggtaacggcccacctagtcttcgatggataggggttctgagaggaaggtcccccacattggaactgagacacggtccaaactcctacgggaggcagcagtgaggaatattggtcaatggacgagagtctgaaccagccaagtagcgtgaaggatgaaggttctatggattgtaaacttcttttatacgggaataaacgaatccacgcgtggatttttgcatgtaccgtatgaataaggatcggctaactccgtgccagcagccgcggtaatacggaggatccgagcgttatccggatttattgggtttaaagggagcgtagatgggttgttaagtcagttgtgaaagtttgcggctcaaccgtaaaattgcaattgatactggcagtcttgagtacagttgaggtaggcggaattcgtggtgtagcggtgaaatgcttagatatcacgaagaactccgattgcgaaggcagcttactaacctgtaactgacattgatgctcgaaagtgtgggtatcaaacaggattagataccctggtagtccacacggtaaacgatgaatactcgctgtaggcgatatacggtctgcggccaagcgaaagcattaagtattccacctggggagtacgccggcaacggtgaaactcaaaggaattgacgggggcccgcacaagcggaggaacatgtggtttaattcgatgatacgcgaggaaccttacccgggcttaaattgcaaccgaatatggcggaaacgccatagctagcaatagcggttgtgaaggtgctgcatggttgtcgtcagctcgtgccgtgaggtgtcggcttaagtgccataacgagcgcaacccttgccgatagttactaacaggttatgctgaggactctgtcgggactgccatcgtaagatgtgaggaaggtggggatgacgtcaaatcagcacggcccttacgtccggggctacacacgtgttacaatggggggtacagagggctgctaccacgcaagtggatgccaatcccaaaaacctctctcagttcggattgaagtctgcaacccgacttcatgaagctggattcgctagtaatcgcgcatcagccacggcgcggtgaatacgttcccgggccttgtacacaccgcccgtcaagccatgggagccgggggtacctgaagtgcgtaaccgcaa

SEQ ID NO: 166 - DNA, 1372 bp, Blautia massiliensis
  modified_base (7)..(7): a, c, t, g, unknown or other
  modified_base (14)..(14): a, c, t, g, unknown or other
  modified_base (21)..(22): a, c, t, g, unknown or other
  modified_base (921)..(921): a, c, t, g, unknown or other
  modified_base (1351)..(1351): a, c, t, g, unknown or other
attgaancttcggncgatttnnattgtttctagtggcggacgggtgagtaacgcgtgggtaacctgccttatacagggggataacagtcagaaatgactgctaataccgcataagcgcacagggctgcatggctcggtgtgaaaaactccggtggtataagatggacccgcgttggattagctagttggtgaggtaacggcccaccaaggcgacgatccatagccggcctgagagggtgaacggccacattgggactgagacacggcccagactcctacgggaggcagcagtggggaatattgcacaatgggggaaaccctgatgcagcgacgccgcgtgaaggaagaagtatctcggtatgtaaacttctatcagcagggaagaaaatgacggtacctgactaagaagccccggctaactacgtgccagcagccgcggtaatacgtagggggcaagcgttatccggatttactgggtgtaaagggagcgtagacggatggacaagtctgatgtgaaaggctggggctcaaccccgggactgcattggaaactgcccgtcttgagtgccggagaggtaagcggaattcctagtgtagcggtgaaatgcgtagatattaggaggaacaccagtggcgaaggcggcttactggacggtaactgacgttgaggctcgaaagcgtggggagcaaacaggattagataccctggtagtccacgcggtaaacgatgaatgctaggtgtcggggagcaaagctcttcggtgccgccgcaaacgcattaagcattccacctggggagtacgttcgcaagaatgaaactcaaaggaattgacggggacccgcacaagcggtggagcatgtggtttaattcgaagcaacgcgaagaaccttaccaagtcttgacatccttctgaccggaanttaaccgttcctttccttcggggacagaagagacaggtggtgcatggttgtcgtcagctcgtgtcgtgagatgttgggttaagtcccgcaacgagcgcaacccctatcctcagtagccagcatttaagatgggcactctggggagactgccagggataacctggaggaaggcggggatgacgtcaaatcatcatgccccttatgatttgggctacacacgtgctacaatggcgtaaacaaagggaagcgaacctgcgagggtgggcaaatcccaaaaataacgtcccagttcggactgtagtctgcaacccgactacacgaagctggaatcgctagtaatcgcggatcagaatgccgcggtgaatacgttcccgggtcttgtacacaccgcccgtcacaccatgggagtcagtaacgcccgaagtcagtnacctaaccgcaaggaaggagc

SEQ ID NO: 167 - DNA, 1391 bp, Dorea longicatena
  modified_base (16)..(17): a, c, t, g, unknown or other
  modified_base (21)..(22): a, c, t, g, unknown or other
  modified_base (37)..(41): a, c, t, g, unknown or other
  modified_base (1067)..(1067): a, c, t, g, unknown or other
tcgagcgaagcacttnnggtnngattcttcggatgannnnntttgtgactgagcggcggacgggtgagtaacgcgtgggtaacctgcctcatacagggggataacagttagaaatgactgctaataccgcataagaccacggtaccgcatggtacagtggtaaaaactccggtggtatgagatggacccgcgtctgattaggtagttggtggggtaacggcctaccaagccgacgatcagtagccgacctgagagggtgaccggccacattgggactgagacacggcccagactcctacgggaggcagcagtggggaatattgcacaatggaggaaactctgatgcagcgacgccgcgtgaaggatgaagtatttcggtatgtaaacttctatcagcagggaagaaaatgacggtacctgactaagaagccccggctaactacgtgccagcagccgcggtaatacgtagggggcaagcgttatccggatttactgggtgtaaagggagcgtagacggcacggcaagccagatgtgaaagcccggggctcaaccccgggactgcatttggaactgctgagctagagtgtcggagaggcaagtggaattcctagtgtagcggtgaaatgcgtagatattaggaggaacaccagtggcgaaggcggcttgctggacgatgactgacgttgaggctcgaaagcgtggggagcaaacaggattagataccctggtagtccacgccgtaaacgatgactgctaggtgtcgggtggcaaagccattcggtgccgcagctaacgcaataagcagtccacctggggagtacgttcgcaagaatgaaactcaaaggaattgacggggacccgcacaagcggtggagcatgtggtttaattcgaagcaacgcgaagaaccttacctgatcttgacatcccgatgaccgcttcgtaatggaagcttttcttcggaacatcggtgacaggtggtgcatggttgtcgtcagctcgtgtcgtgagatgttgggttaagtcccgcaacgagcgcaacccctatcttcagtagccagcaggtantgttgggcactctggagagactgccagggataacctggaggaaggtggggatgacgtcaaatcatcatgccccttatgaccagggctacacacgtgctacaatggcgtaaacaaagagaagcgaactcgcgagggtaagcaaatctcaaaaataacgtctcagttcggattgtagtctgcaactcgactacatgaagctggaatcgctagtaatcgcagatcagaatgctgcggtgaatacgttcccgggtcttgtacacaccgcccgtcacaccatgggagtcagtaacgcccgaagtcagtgacccaaccgtaaggagggag

SEQ ID NO: 168 - DNA, 1374 bp, Collinsella aerofaciens
  modified_base (8)..(11): a, c, t, g, unknown or other
  modified_base (1368)..(1370): a, c, t, g, unknown or other
  modified_base (1372)..(1373): a, c, t, g, unknown or other
tgcagtcnnnngcacctatcttcggatagaagcgagtggcgaacggctgagtaacacgtggagaacctgccccctcccccgggatagccgcccgaaaggacgggtaataccggataccccggggtgccgcatggcaccccggctaaagccccgacgggaggggatggctccgcggcccatcaggtagacggcggggtgacggcccaccgtgccgacaacgggtagccgggttgagagaccgaccggccagattgggactgagacacggcccagactcctacgggaggcagcagtggggaatcttgcgcaatggggggaaccctgacgcagcgacgccgcgtgcgggacggaggccttcgggtcgtaaaccgctttcagcagggaagagtcaagactgtacctgcagaagaagccccggctaactacgtgccagcagccgcggtaatacgtagggggcgagcgttatccggattcattgggcgtaaagcgcgcgtaggcggcccggcaggccgggggtcgaagcgggggggctcaaccccccgaagcccccggaacctccgcggcttgggtccggtaggggagggtggaacacccggtgtagcggtggaatgcgcagatatcgggtggaacaccggtggcgaaggcggccctctgggccgagaccgacgctgaggcgcgaaagctgggggagcgaacaggattagataccctggtagtcccagccgtaaacgatggacgctaggtgtgggggggacgatccccccgtgccgcagcccaacgcattaagcgtcccgcctgggggagtacggccgcaaggctaaaactcaaaggaattgacgggggcccgcacaagcagcggagcatgtggcttaattcgaagcaacgcgaagaaccttaccagggcttgacatatgggtgaagcgggggagaccccgtggccgagaggagcccatacaggtggtgcatggctgtcgtcagctcgtgtcgtgagatgttgggttaagtcccgcaacgagcgcaacccccgccgcgtgttgccatcgggtgatgccgggaacccacgcgggaccgccgccgtcaaggcggaggagggcggggacgacgtcaagtcatcatgccccttatgccctgggctgcacacgtgctacaatggccggtacagagggatgccaccccgcgagggggagcggatcccggaaagccggccccagttcggattgggggctgcaacccgcccccatgaagtcggagttgctagtaatcgcggatcagcatgccgcggtgaatgcgttcccgggccttgtacacaccgcccgtcacaccacccgagtcgtctgcacccgaagtcgccggcccaaccgagagggnnnannc

SEQ ID NO: 169 - DNA, 1383 bp, Parabacteroides distasonis
  modified_base (15)..(17): a, c, t, g, unknown or other
  modified_base (25)..(29): a, c, t, g, unknown or other
  modified_base (1381)..(1381): a, c, t, g, unknown or other
agtcgaggggcagcnnngggtagcnnnnncccgccggcgaccggcgcacgggtgagtaacgcgtatgcaacttgcctatcagagggggataacccggcgaaagtcggactaataccgcatgaagcaggggccccgcatggggatatttgctaaagattcatcgctgatagataggcatgcgttccattaggcagttggcggggtaacggcccaccaaaccgacgatggataggggttctgagaggaaggtcccccacattggtactgagacacggaccaaactcctacgggaggcagcagtgaggaatattggtcaatggccgagaggctgaaccagccaagtcgcgtgagggatgaaggttctatggatcgtaaacctcttttataagggaataaagtgtgggacgtgtcccattttgtatgtaccttatgaataaggatcggctaactccgtgccagcagccgcggtaatacggaggatccgagcgttatccggatttattgggtttaaagggtgcgtaggcggccttttaagtcagcggtgaaagtctgtggctcaaccatagaattgccgttgaaactggggggcttgagtatgtttgaggcaggcggaatgcgtggtgtagcggtgaaatgcatagatatcacgcagaaccccgattgcgaaggcagcctgccaagccattactgacgctgatgcacgaaagcgtggggatcaaacaggattagataccctggtagtccacgcagtaaacgatgatcactagctgtttgcgatacactgtaagcggcacagcgaaagcgttaagtgatccacctggggagtacgccggcaacggtgaaactcaaaggaattgacgggggcccgcacaagcggaggaacatgtggtttaattcgatgatacgcgaggaaccttacccgggtttgaacgcattcggaccgaggtggaaacaccttttctagcaatagccgtttgcgaggtgctgcatggttgtcgtcagctcgtgccgtgaggtgtcggcttaagtgccataacgagcgcaacccttgccactagttactaacaggtaaagctgaggactctggtgggactgccagcgtaagctgcgaggaaggcggggatgacgtcaaatcagcacggcccttacatccggggcgacacacgtgttacaatggcgtggacaaagggaagccacctggcgacagggagcgaatccccaaaccacgtctcagttcggatcggagtctgcaacccgactccgtgaagctggattcgctagtaatcgcgcatcagccatggcgcggtgaatacgttcccgggccttgtacacaccgcccgtcaagccatgggagccgggggtacctgaagtccgtaaccgnga

SEQ ID NO: 170 - DNA, 1374 bp, Eggerthella lenta
  modified_base (8)..(11): a, c, t, g, unknown or other
tgcagtcnnnnatgaaaccgccctcgggcggacatgaagtggcgaacgggtgagtaacacgtgaccaacctgcccccctctccgggacaaccttgggaaaccgaggctaataccggatactccctcccctgctcctgcaggggtcgggaaagcccaggcggagggggatggggtcgcggcccattaggtagtaggcggggtaacggcccacctagcccgcgatgggtagccgggttgagagaccgaccggccacattgggactgagatacggcccagactcctacgggaggcagcagtggggaattttgcgcaatgggggaaaccctgacgcagcaacgccgcgtgcgggacgacggccttcgggttgtaaaccgctttcagcagggaagaaattcgacggtacctgcagaagaagctccggctaactacgtgccagcagccgcggtaatacgtagggagcgagcgttatccggaatcattgggcgtaaagagcgcgtaggcggcctctcaagcgggatctctaatccgagggctcaaccccccggccggatcccgaactgggaggctcgagttcggtagaggcaggcggaattcccggtgtagcggtggaatgcgcagatatcgggaagaacaccgatggcgaaggcagcctgctgggccgcaactgacgctgaggcgcgaaagctaggggagcgaacaggattagataccctggtagtcctagccgtaaacgatggatactaggtgtgggggggctccgccctccgtgccgcagcccaacgcattaagtatcccgcctggggagtacggccgcaaggctaaaactcaaaggaattgacgggggcccgcacaagcagcggagcatgtggcttaattcgaagcaacgcgaagaaccttaccagggcttgacatggacgtgaagccggggaaacccggtggccgagaggagcgtccgcaggtggtgcatggctgtcgtcagctcgtgtcgtgagatgttgggttaagtcccgcaacgagcgcaacccctgccccatgttgccagcattaggttggggactcatgggggactgccggcgtcaagccggaggaaggtggggacgacgtcaagtcatcatgccctttatgccctgggctgcacacgtgctacaatggccggtacaacgggctgcgagaccgcgaggtcgagcgaatccctcaaagccggccccagttcggatcggaggctgcaacccgcctccgtgaagtcggagttgctagtaatcgcggatcagcatgccgcggtgaatacgttcccgggccttgtacacaccgcccgtcacaccacccgagtcgtctgcacccgaagccgccggccgaacccgcaaggggcggag

SEQ ID NO: 171 - DNA, 1396 bp, Bilophila wadsworthia
  modified_base (1388)..(1388): a, c, t, g, unknown or other
tcgaacgtgaaagtccttcgggacgagtaaagtggcgcacgggtgagtaacgcgtggataatctacccttaagatggggataacggctggaaacggtcgctaataccgaatacgctcccgattttatcattggggggaaagatggcctctgcttgcaagctatcgcttaaggatgagtccgcgtcccattagctagttggcggggtaacggcccaccaaggcaacgatgggtagccggtctgagaggatgaccggccacactggaactggaacacggtccagactcctacgggaggcagcagtggggaatattgcgcaatgggcgaaagcctgacgcagcgacgccgcgtgagggatgaaggttctcggatcgtaaacctctgtcaggggggaagaaaccccctcgtgtgaataatgcgagggcttgacggtacccccaaaggaagcaccggctaactccgtgccagcagccgcggtaatacggagggtgcaagcgttaatcggaatcactgggcgtaaagcgcacgtaggcggcttggtaagtcaggggtgaaatcccacagcccaactgtggaactgcctttgatactgccaggcttgagtaccggagagggtggcggaattccaggtgtaggagtgaaatccgtagatatctggaggaacaccggtggcgaaggcggccacctggacggtaactgacgctgaggtgcgaaagcgtgggtagcaaacaggattagataccctggtagtccacgctgtaaacgatgggtgctgggtgctgggatgtatgtctcggtgccgtagctaacgcgataagcaccccgcctggggagtacggtcgcaaggctgaaactcaaagaaattgacggggggcccgcacaagcggtggagtatgtggtttaattcgatgcaacgcgaagaaccttacccaggcttgacatctagggaacccttcggaaatgaaggggtgcccttcggggagccctaagacaggtgctgcatggctgtcgtcagctcgtgccgtgaggtgttgggttaagtcccgcaacgagcgcaacccctatcttcagttgccagcaggtaaggctgggcactctggagagaccgccccggtcaacggggaggaaggtggggacgacgtcaagtcatcatggcccttacgcctggggctacacacgtactacaatggcgcgcacaaagggtagcgagaccgcgaggtggagccaatcccaaaaaacgcgtcccagtccggattggagtctgcaactcgactccatgaagtcggaatcgctagtaattcgagatcagcatgctcgggtgaatgcgttcccgggccttgtacacaccgcccgtcacaccacgaaagtcggttttacccgaagccggtnagctaact

SEQ ID NO: 172 - DNA, 1378 bp, Bifidobacterium longum
  modified_base (8)..(9): a, c, t, g, unknown or other
  modified_base (14)..(15): a, c, t, g, unknown or other
  modified_base (21)..(21): a, c, t, g, unknown or other
  modified_base (1377)..(1377): a, c, t, g, unknown or other
gcagtcgnncgggnnccatcnggctttgcctggtggtgagagtggcgaacgggtgagtaatgcgtgaccgacctgccccatacaccggaatagctcctggaaacgggtggtaatgccggatgctccagttgatcgcatggtcttctgggaaagctttcgcggtatgggatggggtcgcgtcctatcagcttgacggcggggtaacggcccaccgtggcttcgacgggtagccggcctgagagggcgaccggccacattgggactgagatacggcccagactcctacgggaggcagcagtggggaatattgcacaatgggcgcaagcctgatgcagcgacgccgcgtgagggatggaggccttcgggttgtaaacctcttttatcggggagcaagcgagagtgagtttacccgttgaataagcaccggctaactacgtgccagcagccgcggtaatacgtagggtgcaagcgttatccggaattattgggcgtaaagggctcgtagggcggttcgtcgcgtccggtgtgaaagtccatcgcttaacggtggatccgcgccgggtacgggcgggcttgagtgcggtaggggagactggaattcccggtgtaacggtggaatgtgtagatatcgggaagaacaccaatggcgaaggcaggtctctgggccgttactgacgctgaggagcgaaagcgtggggagcgaacaggattagataccctggtagtccacgccgtaaacggtggatgctggatgtggggcccgttccacgggttccgtgtcggagctaacgcgttaagcatcccgcctggggagtacggccgcaaggctaaaactcaaagaaattgacgggggcccgcacaagcggcggagcatgcggattaattcgatgcaacgcgaagaaccttacctgggcttgacatgttcccgacggtcgtagagatgcggcttcccttcggggcgggttcacaggtggtgcatggtcgtcgtcagctcgtgtcgtgagatgttgggttaagtcccgcaacgagcgcaaccctcgccccgtgttgccagcggattatgccgggaactcacgggggaccgccggggttaactcggaggaaggtggggatgacgtcagatcatcatgccccttacgtccagggcttcacgcatgctacaatggccggtacaacgggatgcgacgcggcgacgcggagcggatccctgaaaaccggtctcagttcggatcgcagtctgcaactcgactgcgtgaaggcggagtcgctagtaatcgcgaatcagcaacgtcgcggtgaatgcgttcccgggccttgtacacaccgcccgtcaagtcatgaaagtgggcagcacccgaagccggtggcctaaccccnt

SEQ ID NO: 173 - DNA, 1391 bp, Bacteroides vulgatus
  modified_base (4)..(4): a, c, t, g, unknown or other
tgcngtcgaggggcagcatggtcttagcttgctaaggccgatggcgaccggcgcacgggtgagtaacacgtatccaacctgccgtctactcttggacagccttctgaaaggaagattaatacaagatggcatcatgagtccgcatgttcacatgattaaaggtattccggtagacgatggggatgcgttccattagatagtaggcggggtaacggcccacctagtcttcgatggataggggttctgagaggaaggtcccccacattggaactgagacacggtccaaactcctacgggaggcagcagtgaggaatattggtcaatgggcgagagcctgaaccagccaagtagcgtgaaggatgactgccctatgggttgtaaacttcttttataaaggaataaagtcgggtatggatacccgtttgcatgtactttatgaataaggatcggctaactccgtgccagcagccgcggtaatacggaggatccgagcgttatccggatttattgggtttaaagggagcgtagatggatgtttaagtcagttgtgaaagtttgcggctcaaccgtaaaattgcagttgatactggatatcttgagtgcagttgaggcaggcggaattcgtggtgtagcggtgaaatgcttagatatcacgaagaactccgattgcgaaggcagcctgctaagctgcaactgacattgaggctcgaaagtgtgggtatcaaacaggattagataccctggtagtccacacggtaaacgatgaatactcgctgtttgcgatatactgcaagcggccaagcgaaagcgttaagtattccacctggggagtacgccggcaacggtgaaactcaaaggaattgacgggggcccgcacaagcggaggaacatgtggtttaattcgatgatacgcgaggaaccttacccgggcttaaattgcagatgaattacggtgaaagccgtaagccgcaaggcatctgtgaaggtgctgcatggttgtcgtcagctcgtgccgtgaggtgtcggcttaagtgccataacgagcgcaacccttgttgtcagttactaacaggttccgctgaggactctgacaagactgccatcgtaagatgtgaggaaggtggggatgacgtcaaatcagcacggcccttacgtccggggctacacacgtgttacaatggggggtacagagggccgctaccacgcgagtggatgccaatccccaaaacctctctcagttcggactggagtctgcaacccgactccacgaagctggattcgctagtaatcgcgcatcagccacggcgcggtgaatacgttcccgggccttgtacacaccgcccgtcaagccatgggagccgggggtacctgaagtgcgtaaccgcgaggag

SEQ ID NO: 174 - DNA, 1389 bp, Lactobacillus rogosae
  modified_base (17)..(20): a, c, t, g, unknown or other
  modified_base (28)..(29): a, c, t, g, unknown or other
  modified_base (35)..(36): a, c, t, g, unknown or other
  modified_base (42)..(45): a, c, t, g, unknown or other
gtcgaacgaagcatttnnnnacggattnnttcggnntgaagnnnnttatgactgagtggcggacgggtgagtaacgcgtgggtaacctgcctcacacagggggatagcagttggaaacggctgataataccgcataagcgcacagtaccgcatggtacagtgtgaaaaactccggtggtgtgagatggacccgcgtctgattagcttgttggcggggtaacggcccaccaaggcaacgatcagtagccgacctgagagggtgaccggccacattgggactgagacacggcccagactcctacgggaggcagcagtggggaatattgcacaatggaggaaactctgatgcagcgacgccgcgtgagtgaagaagtaattcgttatgtaaagctctatcagcagggaagatagtgacggtacctgactaagaagctccggctaaatacgtgccagcagccgcggtaatacgtatggagcaagcgttatccggatttactgggtgtaaagggagtgtaggtggcatcacaagtcagaagtgaaagcccggggctcaaccccgggactgcttttgaaactgtggagctggagtgcaggagaggcaagtggaattcctagtgtagcggtgaaatgcgtagatattaggaggaacaccagtggcgaaggcggcttgctggactgtaactgacactgaggctcgaaagcgtggggagcaaacaggattagataccctggtagtccacgccgtaaacgatgaatactaggtgtcggggctcataagagcttcggtgccgcagcaaacgcaataagtattccacctggggagtacgttcgcaagaatgaaactcaaaggaattgacggggacccgcacaagcggtggagcatgtggtttaattcgaagcaacgcgaagaaccttaccaagtcttgacatcctcttgaccggtcagtaatgtgaccttttcttcggaacaagagtgacaggtggtgcatggttgtcgtcagctcgtgtcgtgagatgttgggttaagtcccgcaacgagcgcaacccctattcttagtagccagcatataaggtgggcactctaggaagactgccagggataacctggaggaaggtggggatgacgtcaaatcatcatgccccttatgacttgggctacacacgtgctacaatggcgtaaacaaagtgaagcgagagtgtgagcttaagcaaatcacaaaaataacgtctcagttcggattgtagtctgcaactcgactacatgaagctggaatcgctagtaatcgcgaatcagaatgtcgcggtgaatacgttcccgggtcttgtacacaccgcccgtcacaccatgggagtcggaaatgcccgaagtcggtgacctaacgaaagaag

SEQ ID NO: 175 - DNA, 1386 bp, Unknown
  Description of Unknown: Holdemanella biformis sequence
  modified_base (8)..(9): a, c, t, g, unknown or other
  modified_base (21)..(21): a, c, t, g, unknown or other
  modified_base (1381)..(1381): a, c, t, g, unknown or other
  modified_base (1383)..(1384): a, c, t, g, unknown or other
gcagtcgnncgagaggaaggnaagcttgcttttctaaatctagtggcgaacgggtgagtaacacgtaggtaacctgcccatgtgcccgggataacttctggaaacggatgctaaaaccggataggtagcagacaagcatttgactgctattaaagtggctaaggccatgaacatggatggacctgcggtgcattagctagttggtgaggtaacggcccaccaaggcgacgatgcatagccggcctgagagggcggacggccacattgggactgagacacggcccaaactcctacgggaggcagcagtagggaattttcgtcaatggggggaaccctgaacgagcaatgccgcgtgagtgaggaaggtcttcggatcgtaaagctctgttgtaagagaaaaacggcactcatagggaatgatgagtgagtgatggtatcttaccagaaagtcacggctaactacgtgccagcagccgcggtaatacgtaggtggcgagcgttatccggaatgattgggcgtaaagggtgcgtaggtggcagatcaagtctggagtaaaaggtatgggctcaacccgtacttgctctggaaactgatcagctagagaacagaagaggacggcggaactccatgtgtagcggtaaaatgcgtagatatatggaagaacaccggtggcgaaggcggccgtctggtctggattctgacactgaagcacgaaagcgtggggagcaaataggattagataccctagtagtccacgccgtaaacgatgagaactaggtgttgggggaataactcagtgccgcagttaacgcaataagttctccgcctggggagtatgcacgcaagtgtgaaactcaaaggaattgacgggggcccgcacaagcggtggagtatgtggtttaattcgaagcaacgcgaagaaccttaccaggccttgacatcccttgcagaggtatagagatatatccgaggttatcaaggagacaggtggtgcatggttgtcgtcagctcgtgtcgtgagatgttgggttaagtcccgcaacgagcgcaacccttgtgatatgttactaacattgagttgaggactcatatcagactgccggtgataaaccggaggaaggtggggatgacgtcaaatcatcatgccccttatggcctgggctacacacgtactacaatggcgtctacaaagagcggcaagcctgtgaaggcaagcgaatctcataaaggacgtctcagttcggattgaagtctgcaacccgacttcatgaagctggaatcgctagtaatcgcgaatcagcatgtcgcggtgaatacgttctcgggccttgtacacaccgcccgtcaaaccatgggagttggtaatgcccgaagccggtngnnta

SEQ ID NO: 176 - DNA, 1386 bp, Unknown
  Description of Unknown: Ruthenibacterium lactatiformans sequence
  modified_base (2)..(3): a, c, t, g, unknown or other
  modified_base (10)..(10): a, c, t, g, unknown or other
gnnagtcgancggagctgttttctctgaagttttcggatggaagagagttcagcttagtggcgaacgggtgagtaacacgtgagcaacctgcctttcagtgggggacaacatttggaaacgaatgctaataccgcataagaccacagtgtcgcatggcacaggggtcaaaggatttatccgctgaaagatgggctcgcgtccgattagctagatggtgaggtaacggcccaccatggcgacgatcggtagccggactgagaggttgaacggccacattgggactgagacacggcccagactcctacgggaggcagcagtggggaatattgcacaatgggggaaaccctgatgcagcgacgccgcgtggaggaagaaggtcttcggattgtaaactcctgtcccaggggacgataatgacggtaccctgggaggaagcaccggctaactacgtgccagcagccgcggtaaaacgtagggtgcaagcgttgtccggaattactgggtgtaaagggagcgcaggcggattggcaagttgggagtgaaatctatgggctcaacccataaattgctttcaaaactgtcagtcttgagtggtgtagaggtaggcggaattcccggtgtagcggtggaatgcgtagatatcgggaggaacaccagtggcgaaggcggcctactgggcactaactgacgctgaggctcgaaagcatgggtagcaaacaggattagataccctggtagtccatgccgtaaacgatgattactaggtgtgggaggattgaccccttccgtgccgcagttaacacaataagtaatccacctgggggagtacgaccgcaaggttgaaactcaaaggaattgacgggggcccgcacaagcagtgggagtatgtggtttaattcgaagcaacgcgaagaaccttaccaggtcttgacatcggatgcatacctaagagattagggaagtccttcgggacatccagacaggtggtgcatggttgtcgtcagctcgtgtcgtgagatgttgggttaagtcccgcaacgagcgcaacccttatcgttagttactacgcaagaggactctagcgagactgccgttgacaaaacggaggaaggtggggatgacgtcaaatcatcatgccctttatgacctgggctacacacgtactacaatggctattaacagagagaagcgataccgcgaggtggagcaaacctcacaaaaatagtctcagttcggatcgcaggctgcaacccgcctgcgtgaagccggaattgctagtaatcgcggatcagcatgccgcggtgaatacgttcccgggccttgtacacaccgcccgtcacaccatgagagccggggggacccgaagtcggtagtctaaccgcaag

SEQ ID NO: 177 - DNA, 1359 bp, Parasutterella excrementihominis
  modified_base (16)..(16): a, c, t, g, unknown or other
agaagcttgcttctcnccggcgacgagtggcgaacgggtgagtaatacatcggaacgtgtccgctcgtgggggacaaccagccgaaaggttggctaataccgcatgagttctacggaagaaagagggggacccgcaagggcctctcgcgagcggagcggccgatgactgattagccggttggtgaggtaacggctcaccaaagcaacgatcagtagctggtctgagaggacgaccagccacactgggactgagacacggcccagactcctacgggaggcagcagtggggaattttggacaatgggcgcaagcctgatccagctattccgcgtgtgggatgaaggccctcgggttgtaaaccacttttgtagagaacgaaaagacaccttcgaataaagggtgttgctgacggtactctaagaataagcaccggctaactacgtgccagcagccgcggtaatacgtagggtgcgagcgttaatcggaattactgggcgtaaagggtgcgcaggcggttgagtaagacagatgtgaaatccccgagcttaactcgggaatggcatatgtgactgctcgactagagtgtgtcagagggaggtggaattccacgtgtagcagtgaaatgcgtagatatgtggaagaacaccgatggcgaaggcagcctcctgggacataactgacgctcaggcacgaaagcgtggggagcaaacaggattagataccctggtagtccacgccctaaacgatgttaactagttgttgggaagtaaaattctcagtaacgcagccaacgcgagaagttaaccgcctgggaagtacggtcgcaagactaaaactcaaaggaattgacggggacccgcacaagcggtggatgatgtggattaattcgatgcaacgcgaaaaaccttacctacccttgacatgtcaggaagctcttgtaatgagagcgtgcccgcaagggagcctgaacacaggtgctgcatggctgtcgtcagctcgtgtcgtgagatgttgggttaagtcccgcaacgagcgcaacccttgtcactagttgctacgaaagggcactctagtgagactgccggtgacaaaccggaggaaggtggggatgacgtcaagtcctcatggcccttatgggtagggcttcacacgtcatacaatggtcggaacagagggcagcgaagtcgtgagacggagccaatcccagaaaaccgatcgtagtccggattgcagtctgcaactcgactgcatgaagtcggaatcgctagtaatcgcggatcagcatgccgcggtgaatacgttcccgggtcttgtacacaccgcccgtcaaacaatgggagtggtgtttaccagaagtcg

SEQ ID NO: 178 - DNA, 1380 bp, Bifidobacterium adolescentis
  modified_base (1371)..(1371): a, c, t, g, unknown or other
gtcgaacgggatcccaggagcttgctcctgggtgagagtggcgaacgggtgagtaatgcgtgaccgacctgccccatacaccggaatagctcctggaaacgggtggtaatgccggatgctccagttggatgcatgtccttctgggaaagattcatcggtatgggatggggtcgcgtcctatcagcttgatggcggggtaacggcccaccatggcttcgacgggtagccggcctgagagggcgaccggccacattgggactgagatacggcccagactcctacgggaggcagcagtggggaatattgcacaatgggcgcaagcctgatgcagcgacgccgcgtgcgggatgacggccttcgggttgtaaaccgcttttgactgggagcaagcccttcggggtgagtgtacctttcgaataagcaccggctaactacgtgccagcagccgcggtaatacgtagggtgcaagcgttatccggaattattgggcgtaaagggctcgtaggcggttcgtcgcgtccggtgtgaaagtccatcgcttaacggtggatccgcgccgggtacgggcgggcttgagtgcggtaggggagactggaattcccggtgtaacggtggaatgtgtagatatcgggaagaacaccaatggcgaaggcaggtctctgggccgtcactgacgctgaggagcgaaagcgtggggagcgaacaggattagataccctggtagtccacgccgtaaacggtggatgctggatgtggggaccattccacggtctccgtgtcggagccaacgcgttaagcatcccgcctggggagtacggccgcaaggctaaaactcaaagaaattgacgggggcccgcacaagcggcggagcatgcggattaattcgatgcaacgcgaagaaccttacctgggcttgacatgttcccgacagccgtagagatacggtctcccttcggggcgggttcacaggtggtgcatggtcgtcgtcagctcgtgtcgtgagatgttgggttaagtcccgcaacgagcgcaaccctcgccctgtgttgccagcacgtcgtggtgggaactcacgggggaccgccggggtcaactcggaggaaggtggggatgacgtcagatcatcatgccccttacgtccagggcttcacgcatgctacaatggccggtacaacgggatgcgacaccgcgaggtggagcggatcccttaaaaccggtctcagttcggattggagtctgcaacccgactccatgaaggcggagtcgctagtaatcgcggatcagcaacgccgcggtgaatgcgttcccgggccttgtacacaccgcccgtcaagtcatgaaagtgggtagcacccgaagccggtggcccanccttttggg

SEQ ID NO: 179 - DNA, 1378 bp, Bifidobacterium adolescentis
  modified_base (10)..(10): a, c, t, g, unknown or other
  modified_base (1377)..(1377): a, c, t, g, unknown or other
tgcagtcgancgggatcccaggagcttgctcctgggtgagagtggcgaacgggtgagtaatgcgtgaccgacctgccccatacaccggaatagctcctggaaacgggtggtaatgccggatgctccagttggatgcatgtccttctgggaaagattcatcggtatgggatggggtcgcgtcctatcagcttgatggcggggtaacggcccaccatggcttcgacgggtagccggcctgagagggcgaccggccacattgggactgagatacggcccagactcctacgggaggcagcagtggggaatattgcacaatgggcgcaagcctgatgcagcgacgccgcgtgcgggatgacggccttcgggttgtaaaccgcttttgactgggagcaagcccttcggggtgagtgtacctttcgaataagcaccggctaaactacgtgccagcagccgcggtaatacgtagggtgcaagcgttatccggaattattgggcgtaaagggctcgtaggcggttcgtcgcgtccggtgtgaaagtccatcgcttaacggtggatccgcgccgggtacgggcgggcttgagtgcggtaggggagactggaattcccggtgtaacggtggaatgtgtagatatcgggaagaacaccaatggcgaaggcaggtctctgggccgtcactgacgctgaggagcgaaagcgtggggagcgaacaggattagataccctggtagtccacgccgtaaacggtggatgctggatgtggggaccattccacggtctccgtgtcggagccaacgcgttaagcatcccgcctggggagtacggccgcaaggctaaaactcaaagaaattgacgggggcccgcacaagcggcggagcatgcggattaattcgatgcaacgcgaagaaccttacctgggcttgacatgttcccgacagccgtagagatacggtctcccttcggggcgggttcacaggtggtgcatggtcgtcgtcagctcgtgtcgtgagatgttgggttaagtcccgcaacgagcgcaaccctcgccctgtgttgccagcacgtcgtggtgggaactcacgggggaccgccggggtcaactcggaggaaggtggggatgacgtcagatcatcatgccccttacgtccagggcttcacgcatgctacaatggccggtacaacgggatgcgacaccgcgaggtggagcggatcccttaaaaccggtctcagttcggattggagtctgcaacccgactccatgaaggcggagtcgctagtaatcgcggatcagcaacgccgcggtgaatgcgttcccgggccttgtacacaccgcccgtcaagtcatgaaagtgggtagcacccgaagccggtggcccaanc

SEQ ID NO: 180 - DNA, 1391 bp, Alistipes sp.
  modified_base (4)..(4): a, c, t, g, unknown or other
  modified_base (9)..(9): a, c, t, g, unknown or other
  modified_base (1385)..(1385): a, c, t, g, unknown or other
tgcnagtcngaggggcagcattcgggtagcaatacctgagatggcgaccggcgcacgggtgcgtaacgcgtatgcaacctacccataacaggggcataacactgagaaattggtactaattccccataacattcgaagaggcatcttttcgggttgaaaactccggtggttatggatgggcatgcgttgtattagctggttggtgaggtaacggctcaccaaggcgacgatacatagggggactgagaggttaaccccccacattggtactgagacacggaccaaactcctacgggaggcagcagtgaggaatattggtcaatggacgcaagtctgaaccagccatgccgcgtgcaggaagacggctctatgagttgtaaactgcttttgtacgagggtaaactcagatacgtgtatctgactgaaagtatcgtacgaataaggatcggctaactccgtgccagcagccgcggtaatacggaggattcaagcgttatccggatttattgggtttaaagggtgcgtaggcggtctgataagttagaggtgaaatcccggggcttaactccggaattgcctctgatactgttgggctagagagtagttgcggtaggcggaatgtatggtgtagcggtgaaatgcttagagatcatacagaacaccgattgcgaaggcagcttaccaaactatatctgacgttgaggcacgaaagcgtggggagcaaacaggattagataccctggtagtccacgcagtaaacgatgataactcgctgtcggcgatacacagtcggtggctaagcgaaagcgataagttatccacctggggagtacgttcgcaagaatgaaactcaaaggaattgacgggggcccgcacaagcggaggaacatgtggtttaattcgatgatacgcgaggaaccttacccgggcttgaaagttagcgacgattctggaaacaggatttcccttcggggcgcgaaactaggtgctgcatggttgtcgtcagctcgtgccgtgaggtgtcgggttaagtcccataacgagcgcaacccctaccgttagttgccatcaggtcaagctgggcactctggcgggactgccggtgtaagccgagaggaaggtggggatgacgtcaaatcagcacggcccttacgtccggggctacacacgtgttacaatggtaggtacagagggcagctaccctgcgaagggatgcgaatctcgaaagcctatctcagttcggattggaggctgaaacccgcctccatgaagttggattcgctagtaatcgcgcatcagccatggcgcggtgaatacgttcccgggccttgtacacaccgcccgtcaagccatggaagctgggggtgcctgaagttcgtgaccgncaagga

SEQ ID NO: 181 - DNA, 1379 bp, Blautia wexlerae
  modified_base (14)..(14): a, c, t, g, unknown or other
  modified_base (16)..(16): a, c, t, g, unknown or other
  modified_base (19)..(19): a, c, t, g, unknown or other
  modified_base (22)..(23): a, c, t, g, unknown or other
  modified_base (28)..(28): a, c, t, g, unknown or other
  modified_base (36)..(37): a, c, t, g, unknown or other
  modified_base (43)..(43): a, c, t, g, unknown or other
  modified_base (48)..(48): a, c, t, g, unknown or other
  modified_base (778)..(779): a, c, t, g, unknown or other
  modified_base (921)..(921): a, c, t, g, unknown or other
  modified_base (932)..(935): a, c, t, g, unknown or other
  modified_base (942)..(942): a, c, t, g, unknown or other
  modified_base (949)..(949): a, c, t, g, unknown or other
  modified_base (954)..(956): a, c, t, g, unknown or other
  modified_base (959)..(959): a, c, t, g, unknown or other
  modified_base (961)..(961): a, c, t, g, unknown or other
tgcagtcgacgggnantanttnnttganacttcggnngatttngattntatttctagtggcggacgggtgagtaacgcgtgggtaacctgccttatacagggggataacagtcagaaatggctgctaataccgcataagcgcacagagctgcatggctcagtgtgaaaaactccggtggtataagatggacccgcgttggattagcttgttggtggggtaacggcccaccaaggcgacgatccatagccggcctgagagggtgaacggccacattgggactgagacacggcccagactcctacgggaggcagcagtggggaatattgcacaatgggggaaaccctgatgcagcgacgccgcgtgaaggaagaagtatctcggtatgtaaacttctatcagcagggaagatagtgacggtacctgactaagaagccccggctaactacgtgccagcagccgcggtaatacgtagggggcaagcgttatccggatttactgggtgtaaagggagcgtagacggtgtggcaagtctgatgtgaaaggcatgggctcaacctgtggactgcattggaaactgtcatacttgagtgccggaggggtaagcggaattcctagtgtagcggtgaaatgcgtagatattaggaggaacaccagtggcgaaggcggcttactggacggtaactgacgttgaggctcgaaagcgtggggagcaaacaggattagataccctggtagtccacgccgtaaacgatgaatactaggtgtcggggagcatgnntcttcggtgccgtcgcaaacgcagtaagtattccacctggggagtacgttcgcaagaatgaaactcaaaggaattgacggggacccgcacaagcggtggagcatgtggtttaattcgaagcaacgcgaagaaccttaccaantcttgacatcnnnntgaccgntctttantcggnnnttntnttcggaacagaggagacaggtggtgcatggttgtcgtcagctcgtgtcgtgagatgttgggttaagtcccgcaacgagcgcaacccctatcctcagtagccagcatttaaggtgggcactctggggagactgccagggataacctggaggaaggcggggatgacgtcaaatcatcatgccccttatgatttgggctacacacgtgctacaatggcgtaaacaaagggaagcgagattgtgagatggagcaaatcccaaaaataacgtcccagttcggactgtagtctgcaacccgactacacgaagctggaatcgctagtaatcgcggatcagaatgccgcggtgaatacgttcccgggtcttgtacacaccgcccgtcacaccatgggagtcagtaacgcccgaagtcagtgaccta

SEQ ID NO: 182 - DNA, 1392 bp, Bacteroides coprocola
  modified_base (2)..(2): a, c, t, g, unknown or other
  modified_base (28)..(28): a, c, t, g, unknown or other
  modified_base (37)..(37): a, c, t, g, unknown or other
angtcgaggggcagcatgaacttagctntgctaagtnttgatggcgaccggcgcacgggtgagtaacacgtatccaaccttccgtttactcagggatagcctttcgaaagaaagattaatacctgatagtatggtgagattgcatgatgacaccattaaagatttattggtaaacgatggggatgcgttccattaggtagtaggcggggtaacggcccacctagccggcgatggataggggttctgagaggaaggtcccccacattggaactgagacacggtccaaactcctacgggaggcagcagtgaggaatattggtcaatgggcgagagcctgaaccagccaagtagcgtgaaggatgaaggtcctacggattgtaaacttcttttatacgggaataaagtttcctacgtgtaggattttgtatgtaccgtatgaataagcatcggctaactccgtgccagcagccgcggtaatacggaggatgcgagcgttatccggatttattgggtttaaagggagcgcagacgggagattaagtcagttgtgaaagtttgcggctcaaccgtaaaattgcagttgatactggtttccttgagtgcagttgaggcaggcggaattcgtggtgtagcggtgaaatgcttagatatcacgaagaaccccgattgcgaaggcagcttgctaaactgtaactgacgttcatgctcgaaagtgtgggtatcaaacaggattagataccctggtagtccacacggtaaacgatggatactcgctgttggcgatatactgtcagcggccaagcgaaagcattaagtatcccacctggggagtacgccggcaacggtgaaactcaaaggaattgacgggggcccgcacaagcggaggaacatgtggtttaattcgatgatacgcgaggaaccttacccgggcttaaattgcagacgaattacgaggaaacttgtaagccgcaaggcgtctgtgaaggtgctgcatggttgtcgtcagctcgtgccgtgaggtgtcggcttaagtgccataacgagcgcaaccctcgtggtcagttactaacaggttaagctgaggactctggccagactgccatcgtaagatgtgaggaaggtggggatgacgtcaaatcagcacggcccttacgtccggggctacacacgtgttacaatgggaggtacagaaggccgctacccggcaacgggatgccaatccccaaaacctctctcagttcggactggagtctgcaacccgactccacgaagctggattcgctagtaatcgcgcatcagccacggcgcggtgaatacgttcccgggccttgtacacaccgcccgtcaagccatgaaagccgggggtacctgaagtgcgtaaccgcaaggagc

SEQ ID NO: 183 - DNA, 1387 bp, Bacteroides dorei
  modified_base (15)..(15): a, c, t, g, unknown or other
  modified_base (23)..(23): a, c, t, g, unknown or other
gaggggcagcatggncttagctntgctaaggctgatggcgaccggcgcacgggtgagtaacacgtatccaacctgccgtctactcttggccagccttctgaaaggaagattaatccaggatgggatcatgagttcacatgtccgcatgattaaaggtattttccggtagacgatggggatgcgttccattagatagtaggcggggtaacggcccacctagtcaacgatggataggggttctgagaggaaggtcccccacattggaactgagacacggtccaaactcctacgggaggcagcagtgaggaatattggtcaatgggcgatggcctgaaccagccaagtagcgtgaaggatgactgccctatgggttgtaaacttcttttataaaggaataaagtcgggtatgcatacccgtttgcatgtactttatgaataaggatcggctaactccgtgccagcagccgcggtaatacggaggatccgagcgttatccggatttattgggtttaaagggagcgtagatggatgtttaagtcagttgtgaaagtttgcggctcaaccgtaaaattgcagttgatactggatgtcttgagtgcagttgaggcaggcggaattcgtggtgtagcggtgaaatgcttagatatcacgaagaactccgattgcgaaggcagcctgctaagctgcaactgacattgaggctcgaaagtgtgggtatcaaacaggattagataccctggtagtccacacggtaaacgatgaatactcgctgtttgcgatatacggcaagcggccaagcgaaagcgttaagtattccacctggggagtacgccggcaacggtgaaactcaaaggaattgacgggggcccgcacaagcggaggaacatgtggtttaattcgatgatacgcgaggaaccttacccgggcttaaattgcactcgaatgatccggaaacggttcagctagcaatagcgagtgtgaaggtgctgcatggttgtcgtcagctcgtgccgtgaggtgtcggcttaagtgccataacgagcgcaacccttgttgtcagttactaacaggtgatgctgaggactctgacaagactgccatcgtaagatgtgaggaaggtggggatgacgtcaaatcagcacggcccttacgtccggggctacacacgtgttacaatggggggtacagagggccgctaccacgcgagtggatgccaatccctaaaacccctctcagttcggactggagtctgcaacccgactccacgaagctggattcgctagtaatcgcgcatcagccacggcgcggtgaatacgttcccgggccttgtacacaccgcccgtcaagccatgggagccgggggtacctgaagtgcgtaaccgcgagg

SEQ ID NO: 184 - DNA, 1386 bp, Bacteroides faecis
  modified_base (1384)..(1385): a, c, t, g, unknown or other
gcagtcgaggggcatcatgcttatagcaatataagtgatggcgaccggcgcacgggtgagtaacacgtatccaacctgccgataactcggggatagcctttcgaaagaaagattaatacccgatggcataatagaaccgcacggtttgattattaaagaatttcggttatcgatggggatgcgttccattaggcagttggtggggtaacggcccaccaaaccttcgatggataggggttctgagaggaaggtcccccacattggaactgagacacggtccaaactcctacgggaggcagcagtgaggaatattggtcaatggacgagagtctgaaccagccaagtagcgtgaaggatgactgccctatgggttgtaaacttcttttatatgggaataaagtggtccacgtgtggatttttgtatgtaccatatgaataaggatcggctaactccgtgccagcagccgcggtaatacggaggatccgagcgttatccggatttattgggtttaaagggagcgtaggtggacagttaagtcagttgtgaaagtttgcggctcaaccgtaaaattgcagttgatactggctgtcttgagtacagtagaggtgggcggaattcgtggtgtagcggtgaaatgcttagatatcacgaagaactccgattgcgaaggcagctcactggactgcaactgacactgatgctcgaaagtgtgggtatcaaacaggattagataccctggtagtccacacagtaaacgatgaatactcgctgtttgcgatatacagtaagcggccaagcgaaagcattaagtattccacctggggagtacgccggcaacggtgaaactcaaaggaattgacgggggcccgcacaagcggaggaacatgtggtttaattcgatgatacgcgaggaaccttacccgggcttaaattgcatttgaatatattggaaacagtatagtcgtaagacaaatgtgaaggtgctgcatggttgtcgtcagctcgtgccgtgaggtgtcggcttaagtgccataacgagcgcaacccttatctttagttactaacaggtcatgctgaggactctagagagactgccgtcgtaagatgtgaggaaggtggggatgacgtcaaatcagcacggcccttacgtccggggctacacacgtgttacaatggggggtacagaaggcagctacctggtgacaggatgctaatcccaaaagcctctctcagttcggatcgaagtctgcaacccgacttcgtgaagctggattcgctagtaatcgcgcatcagccatggcgcggtgaatacgttcccgggccttgtacacaccgcccgtcaagccatgaaagccgggggtacctgaagtacgtaaccgcaanng

SEQ ID NO: 185 - DNA, 1395 bp, Unknown
  Description of Unknown: Eisenbergiella tayi sequence
  modified_base (1391)..(1394): a, c, t, g, unknown or other
tgcagtcgaacgaagttagacagaggaagttttcggatggaatcggtataacttagtggcggacgggtgagtaacgcgtgggaaacctgccctgtaccgggggataacacttagaaataggtgctaataccgcataagcgcacggaaccgcatggttgtgtgtgaaaaactccggtggtacaggatggtcccgcgtctgattagccagttggcagggtaacggcctaccaaagcgacgatcagtagccggcctgagagggtgaacggccacattgggactgagacacggcccaaactcctacgggaggcagcagtggggaatattgcacaatgggggaaaccctgatgcagcgacgccgcgtgagtgaagaagtatttcggtatgtaaagctctatcagcagggaagaaaatgacggtacctgactaagaagccccggctaactacgtgccagcagccgcggtaatacgtagggggcaagcgttatccggatttactgggtgtaaagggagcgtagacggcatggcaagccagatgtgaaaacccagggctcaaccttgggattgcatttggaactgccaggctggagtgcaggagaggtaagcggaattcctagtgtagcggtgaaatgcgtagatattaggaggaacaccagtggcgaaggcggcttactggactgtaactgacgttgaggctcgaaagcgtggggagcaaacaggattagataccctggtagtccacgcggtaaacgatgattgctaggtgtaggtgggtatggacccatcggtgccgcagctaacgcaataagcaatccacctggggagtacgttcgcaagaatgaaactcaaaggaattgacggggacccgcacaagcggtggagcatgtggtttaattcgaagcaacgcgaagaaccttaccaagtcttgacatccccttgaagatcttgtaaaaaggctttcccttcggggcaagggagacaggtggtgcatggttgtcgtcagctcgtgtcgtgagatgttgggttaagtcccgcaacgagcgcaacccttattcttagtagccagcaggtaaagctgggcactctaaggagactgccggggataacccggaggaaggcggggatgacgtcaaatcatcatgccccttatgatttgggctacacacgtgctacaatggcgtaaacaaagggaagcgagacagtgatgtggagcaaatcccagaaataacgtctcagttcggattgtagtctgcaactcgactacatgaagctggaatcgctagtaatcgcgaatcagcatgtcgcggtgaatacgttcccgggtcttgtacacaccgcccgtcacaccatgggagttggaaatgcccgaagtctgtgacctaaccgaaagggnnnnc

SEQ ID NO: 186 - DNA, 1390 bp, Coprococcus comes
  modified_base (4)..(5): a, c, t, g, unknown or other
  modified_base (16)..(19): a, c, t, g, unknown or other
  modified_base (39)..(41): a, c, t, g, unknown or other
tcgnncgaagcacttnnnnttgattcttcggatgaagannngtttgtgactgagtggcggacgggtgagtaacgcgtgggtaacctgcctcatacagggggataacagttagaaatgactgctaataccgcataagaccacggagccgcatggctcagtgggaaaaactccggtggtatgagatggacccgcgtctgattaggtagttggtggggtaacggcctaccaagccaacgatcagtagccgacctgagagggtgaccggccacattgggactgagacacggcccaaactcctacgggaggcagcagtggggaatattgcacaatgggggaaaccctgatgcagcgacgccgcgtgagcgaagaagtatttcggtatgtaaagctctatcagcagggaagaaaatgacggtacctgactaagaagcaccggctaaatacgtgccagcagccgcggtaatacgtatggtgcaagcgttatccggatttactgggtgtaaagggagcgtagacggctgtgtaagtctgaagtgaaagcccggggctcaaccccgggactgctttggaaactatgcagctagagtgtcggagaggtaagtggaattcccagtgtagcggtgaaatgcgtagatattgggaggaacaccagtggcgaaggcggcttactggacgatgactgacgttgaggctcgaaagcgtggggagcaaacaggattagataccctggtagtccacgccgtaaacgatgactactaggtgtcggggagcaaagctcttcggtgccgcagcaaacgcaataagtagtccacctggggagtacgttcgcaagaatgaaactcaaaggaattgacggggacccgcacaagcggtggagcatgtggtttaattcgaagcaacgcgaagaaccttacctgctcttgacatcccggtgaccggcatgtaatgatgccttttcttcggaacaccggtgacaggtggtgcatggttgtcgtcagctcgtgtcgtgagatgttgggttaagtcccgcaacgagcgcaacccttatcttcagtagccagcaatttggatgggcactctggagagactgccagggataacctggaggaaggtggggatgacgtcaaatcatcatgccccttatgagcagggctacacacgtgctacaatggcgtaaacaaagggaagcgagcctgcgagggtaagcaaatctcaaaaataacgtctcagttcggattgtagtctgcaactcgactacatgaagctggaatcgctagtaatcgcgaatcagcatgtcgcggtgaatacgttcccgggtcttgtacacaccgcccgtcacaccatgggagttggtaacgcccgaagtcagtgacccaaccgtaaggaggga

SEQ ID NO: 187 - DNA, 1396 bp, Eubacterium rectale
  modified_base (10)..(10): a, c, t, g, unknown or other
  modified_base (1395)..(1395): a, c, t, g, unknown or other
tgcagtcgancgaagcactttatttgatttccttcgggactgattattttgtgactgagtggcggacgggtgagtaacgcgtgggtaacctgccttgtacagggggataacagttggaaacggctgctaataccgcataagcgcacggcatcgcatgatgcagtgtgaaaaactccggtggtataagatggacccgcgttggattagctagttggtgaggtaacggcccaccaaggcgacgatccatagccgacctgagagggtgaccggccacattgggactgagacacggcccaaactcctacgggaggcagcagtggggaatattgcacaatgggcgaaagcctgatgcagcgacgccgcgtgagcgaagaagtatttcggtatgtaaagctctatcagcagggaagataatgacggtacctgactaagaagcaccggctaaatacgtgccagcagccgcggtaatacgtatggtgcaagcgttatccggatttactgggtgtaaagggagcgcaggcggtgcggcaagtctgatgtgaaagcccggggctcaaccccggtactgcattggaaactgtcgtactagagtgtcggaggggtaagcggaattcctagtgtagcggtgaaatgcgtagatattaggaggaacaccagtggcgaaggcggcttactggacgataactgacgctgaggctcgaaagcgtggggagcaaacaggattagataccctggtagtccacgccgtaaacgatgaatactaggtgttgggaagcattgcttctcggtgccgtcgcaaacgcagtaagtattccacctgggggagtacgttcgcaagaatgaaactcaaaggaattgacggggacccgcacaagcggtggagcatgtggtttaattcgaagcaacgcgaagaaccttaccaagtcttgacatccttctgaccggtacttaatcgtaccttctcttcggagcaggagtgacaggtggtgcatggttgtcgtcagctcgtgtcgtgagatgttgggttaagtcccgcaacgagcgcaacccttatctttagtagccagcggtcaggccgggcactctagagagactgccagggataacctggaggaaggcggggatgacgtcaaatcatcatgccccttatgacttgggctacacacgtgctacaatggcgtaaacaaagggaagcaaagctgtgaagccgagcaaatctcaaaaataacgtctcagttcggactgtagtctgcaacccgactacacgaagctggaatcgctagtaatcgcagatcagaatgctgcggtgaatacgttcccgggtcttgtacacaccgcccgtcacaccatgggagttgggaatgcccgaagccagtgacctaaccgaaaggaagna

SEQ ID NO: 188 - DNA, 1377 bp, Blautia faecis
  modified_base (4)..(4): a, c, t, g, unknown or other
  modified_base (6)..(8): a, c, t, g, unknown or other
  modified_base (19)..(19): a, c, t, g, unknown or other
  modified_base (27)..(28): a, c, t, g, unknown or other
  modified_base (34)..(34): a, c, t, g, unknown or other
  modified_base (885)..(885): a, c, t, g, unknown or other
  modified_base (1374)..(1374): a, c, t, g, unknown or other
cggnannnttttattgaancttcggcnnatttancttgtttctagtggcggacgggtgagtaacgcgtgggtaacctgccttatactgggggataacagccagaaatgactgctaataccgcataagcgcacagaaccgcatggttccgtgtgaaaaactccggtggtataagatggacccgcgttggattagctagttggcagggcagcggcctaccaaggcgacgatccatagccggcctgagagggtgaacggccacattgggactgagacacggcccagactcctacgggaggcagcagtggggaatattgcacaatgggggaaaccctgatgcagcgacgccgcgtgaaggaagaagtatctcggtatgtaaacttctatcagcagggaagataatgacggtacctgactaagaagccccggctaactacgtgccagcagccgcggtaatacgtagggggcaagcgttatccggatttactgggtgtaaagggagcgtagacggcgcagcaagtctgatgtgaaaggcaggggcttaacccctggactgcattggaaactgctgtgcttgagtgccggaggggtaagcggaaattcctagtgtagcggtgaaatgcgtagatattaggaggaacaccagtggcgaaggcggcttactggacggtaactgacgttgaggctcgaaagcgtggggagcaaacaggattagataccctgggtatccacgccgtaaacgatgaaatactaggtgtcagggagcacagtctttggtgccccgcaaacgcattaagtattccacctgggggagtacgttcgcaagaatgaaactcaaaggaattgacggggacccgcacaagcggtggaagcatgtggtttaattngaagcaacgcgaagaaccttaccaaatcttgacatccctctgaccgggacttaaccgtccctttccttcgggacaggggagacaggtggtgcatggttgtcgtcagctcgtgtcgtgagatgttgggttaagtcccgcaacgagcgcaacccctatccttagtagccagcacgtaatggtgggcactctgaggagactgccagggataacctggaggaaggcggggatgacgtcaaatcatcatgccccttatgatttgggctacacacgtgctacaatggcgtaaacaaagggaagcgaacccgcgagggtgggcaaatctcaaaaataacgtcccagttcggactgcagtctgcaactcgactgcacgaagctggaatcgctagtaatcgcggatcagaatgccgcggtgaatacgttcccgggtcttgtacacaccgcccgtcacaccatgggagtcagtaacgcccgaagtcagtgacctaaccngca

SEQ ID NO: 189 - DNA, 1386 bp, Bacteroides ovatus
  modified_base (1105)..(1105): a, c, t, g, unknown or other
gaggggcagcattttagtttgcttgcaaactgaagatggcgaccggcgcacgggtgagtaacacgtatccaacctgccgataactccggaatagcctttcgaaagaaagattaataccggatagcatacgaatatcgcatgatatttttattaaagaatttcggttatcgatggggatgcgttccattagtttgttggcggggtaacggcccaccaagactacgatggataggggttctgagaggaaggtcccccacattggaactgagacacggtccaaactcctacgggaggcagcagtgaggaatattggtcaatgggcgagagcctgaaccagccaagtagcgtgaaggatgaaggctctatgggtcgtaaacttcttttatatgggaataaagttttccacgtgtggaattttgtatgtaccatatgaataaggatcggctaactccgtgccagcagccgcggtaatacggaggatccgagcgttatccggatttattgggtttaaagggagcgtaggtggattgttaagtcagttgtgaaagtttgcggctcaaccgtaaaattgcagttgaaactggcagtcttgagtacagtagaggtgggcggaattcgtggtgtagcggtgaaatgcttagatatcacgaagaactccgattgcgaaggcagctcactagactgtcactgacactgatgctcgaaagtgtgggtatcaaacaggattagataccctggtagtccacacagtaaacgatgaatactcgctgtttgcgatatacagtaagcggccaagcgaaagcattaagtattccacctggggagtacgccggcaacggtgaaactcaaaggaattgacgggggcccgcacaagcggaggaacatgtggtttaattcgatgatacgcgaggaaccttacccgggcttaaattgcaacagaatatattggaaacagtatagccgtaaggctgttgtgaaggtgctgcatggttgtcgtcagctcgtgccgtgaggtgtcggcttaagtgccataacgagcgcaacccttatctttagttactaacaggtcatgctgaggactctagagagactgccgtcgtaagangtgaggaaggtggggatgacgtcaaatcagcacggcccttacgtccggggctacacacgtgttacaatggggggtacagaaggcggctacctggtgacaggatgctaatcccaaaaacctctctcagttcggatcgaagtctgcaacccgacttcgtgaagctggattcgctagtaatcgcgcatcagccatggcgcggtgaatacgttcccgggccttgtacacaccgcccgtcaagccatgaaagccgggggtacctgaagtacgtaaccgcaaggagc

SEQ ID NO: 190 - DNA, 1390 bp, Bacteroides finegoldii
agtcgaggggcagcattttagtttgcttgcaaactaaagatggcgaccggcgcacgggtgagtaacacgtatccaacctgccgataactcagggatagcctttcgaaagaaagattaataccggatggcataggattatcgcatgatgatcctattaaagaatttcggttatcgatggggatgcgttccattagtttgttggcggggtaacggcccaccaagacagcgatggataggggttctgagaggaaggtcccccacattggaactgagacacggtccaaactcctacgggaggcagcagtgaggaatattggtcaatggacgagagtctgaaccagccaagtagcgtgaaggatgactgccctatgggttgtaaacttcttttatacgggaataaagtggtccacgtgtggatttttgtatgtaccgtatgaataaggatcggctaactccgtgccagcagccgcggtaatacggaggatccgagcgttatccggatttattgggtttaaagggagcgtaggtggattgttaagtcagttgtgaaagtttgcggctcaaccgtaaaattgcagttgatactggcagtcttgagtacagtagaggtgggcggaattcgtggtgtagcggtgaaatgcttagatatcacgaagaactccgattgcgaaggcagctcactggactgcaactgacactgatgctcgaaagtgtgggtatcaaacaggattagataccctggtagtccacacagtaaacgatgaatactcgctgtttgcgatatacggtaagcggccaagcgaaagcgttaagtattccacctggggagtacgccggcaacggtgaaactcaaaggaattgacgggggcccgcacaagcggaggaacatgtggtttaattcgatgatacgcgaggaaccttacccgggcttaaattacatttgaataatctggaaacaggttagccgtaaggcaaatgtgaaggtgctgcatggttgtcgtcagctcgtgccgtgaggtgtcggcttaagtgccataacgagcgcaacccttatcttcagttactaacagggtcatgctgaggactctggagagactgccgtcgtaagatgtgaggaaggtggggatgacgtcaaatcagcacggcccttacgtccggggctacacacgtgttacaatggggggtacagaaggcagctacctggtgacaggatgctaatcccaaaaacctctctcagttcggatcgaagtctgcaacccgacttcgtgaagctggattcgctagtaatcgcgcatcagccatggcgcggtgaatacgttcccgggccttgtacacaccgcccgtcaagccatgaaagccgggggtacctgaagtacgtaaccgcgaggag

SEQ ID NO: 191 - DNA, 1360 bp, Unknown
  Description of Unknown: Clostridiaceae sp. FBI00191 sequence
  modified_base (16)..(16): a, c, t, g, unknown or other
  modified_base (22)..(28): a, c, t, g, unknown or other
  modified_base (747)..(747): a, c, t, g, unknown or other
  modified_base (1356)..(1357): a, c, t, g, unknown or other
  modified_base (1359)..(1359): a, c, t, g, unknown or other
tgcagtcgagcggacntcttcnnnnnnncagcggcggacgggtgagtaacacgtgggtaacctgccttgtagagggggatagccttccgaaaggaagattaataccgcataacattgcgatatcgcatgatattgcaatcaaaggagcaatctactacaagatggacccgcggcgcattagctagttggtgaggtaagggctcaccaaggcaacgatgcgtagccggcctgagagggtgaacggccacattggaactgagacacggtccagactcctacgggaggcagcagtggggaatattgcacaatgggcgaaagcctgatgcagcaacgccgcgtgagtgatgaaggccttcgggttgtaaagctctgtcttctgggacgataatgacggtaccagaggaggaagccacggctaactacgtgccagcagccgcggtaatacgtaggtggcaagcgttgtccggatttactgggcgtaaaggatgcgtaggcggatatttaagtgagatgtgaaaatcccgggcttaacttgggaactgcatttcaaactgggtatctagagtgcaggagaggaaagcggaattcctagtgtagcggtgaaatgcgtagagattaggaagaacaccagtggcgaaggcggctttctggactgtaactgacgctgaggcatgaaagcgtggggagcaaacaggattagataccctggtagtccacgccgtaaacgatgaatactaggtgtggggngttgtcatgacttccgtgccgcagttaacacaataagtattccgcctggggagtacggtcgcaagattaaaactcaaaggaattgacgggggcccgcacaagcagcggagcatgtggtttaattcgaagcaacgcgaagaaccttacctagacttgacatctcctgaattactcgtaacggaggaagcccttcggggcaggaagacaggtggtgcatggttgtcgtcagctcgtgtcgtgagatgttgggttaagtcccgcaacgagcgcaacccttgtcgttagttgctaccattaagttgagcactctagcgagactgccgcggttaacgcggaggaaggtggggatgacgtcaaatcatcatgccccttatgtctagggctacacacgtgctacaatggtgagtacaacgagaaccgataccgcaaggtggaggaaaactcaaaaactcatcccagttcggattgcaggctgcaactcgcctgcatgaagctggagttgctagtaatcgcaaatcagaatgttgcggtgaatacgttcccgggccttgtacacaccgcccgtcacaccatgagagttgccaacacccgaagtccgtgaggtaaccnnang

SEQ ID NO: 192 - DNA, 1402 bp, Sutterella wadsworthensis
  modified_base (1400)..(1401): a, c, t, g, unknown or other
tgcagtcgaacggcagcgcggggagcttgctccctggcggcgagtggcgcacgggtgagtaatacatcggaacgtgtcttctagtgggggataactgcccgaaagggcagctaataccgcatgagacctgagggtgaaagcgggggatcgcaagacctcgcgctggaagagcggccgatgtccgattagctagttggtgaggtaaaggctcaccaaggcgacgatcggtagctggtctgagaggacgaccagccacactgggactgagacacggcccagactcctacgggaggcagcagtggggaattttggacaatgggggcaaccctgatccagccatgccgcgtgcaggatgaaggtcttcggattgtaaactgcttttgtcagggacgaaaagggatgcgataacaccgcattccgctgacggtacctgaagaataagcaccggctaactacgtgccagcagccgcggtaatacgtagggtgcaagcgttaatcggaattactgggcgtaaagcgtgcgcaggcggttctgtaagatagatgtgaaatccccgggctcaacctgggaattgcatatatgactgcaggacttgagtttgtcagaggagggtggaattccacgtgtagcagtgaaatgcgtagatatgtggaagaacaccgatggcgaaggcagccctctgggacatgactgacgctcatgcacgaaagcgtggggagcaaacaggattagataccctggtagtccacgccctaaacgatgtctactagttgttggggacgatagtccttggtaacgcagctaacgcgtgaagtagaccgcctggggagtacggtcgcaagattaaaactcaaaggaattgacggggacccgcacaagcggtggatgatgtggattaattcgatgcaacgcgaaaaaccttacctagccttgacatgccaggaagtctgagagatcaggccgtgcccgcaagggaatctggacacaggtgctgcatggctgtcgtcagctcgtgtcgtgagatgttgggttaagtcccgcaacgagcgcaacccttgtcattagttgctacgaaagggcactctaatgagactgccggtgacaaaccggaggaaggtggggatgacgtcaagtcctcatggcccttatggctagggcctcacacgtcatacaatggtcggaacagagggaagcgaagccgcgaggtgaagccaatcccagaaaaccgatcgtagtccggattgcagtctgcaactcgactgcatgaagtcggaatcgctagtaatcgcggatcagcatgccgcggtgaatacgttcccgggtcttgtacacaccgcccgtcacaccatgggagtggggttcaccagaagacgtttgcccaaccgaaaggaaggcggcnnc

SEQ ID NO: 193 - DNA, 1397 bp, Alistipes onderdonkii
  modified_base (2)..(3): a, c, t, g, unknown or other
  modified_base (5)..(5): a, c, t, g, unknown or other
  modified_base (9)..(10): a, c, t, g, unknown or other
  modified_base (1385)..(1385): a, c, t, g, unknown or other
anncntgcnngtcgaggggcatcgggattgaagcttgcttcaattgccggcgaccggcgcacgggtgcgtaacgcgtatgtaacctacctataacaggggcataacactgagaaattggtactaattccccataatattcggagaggcatctctccgggttgaaaactccggtggttatagatggacatgcgttgtattagctagttggtgaggtaacggctcaccaaggcaacgatacatagggggactgagaggttaaccccccacactggtactgagacacggaccagactcctacgggaggcagcagtgaggaatattggtcaatggacgcaagtctgaaccagccatgccgcgtgcaggaagacggctctatgagttgtaaactgcttttgtacgagggtaaactcacctacgtgtaggtgactgaaagtatcgtacgaataaggatcggctaactccgtgccagcagccgcggtaatacggaggattcaagcgttatccggatttattgggtttaaagggtgcgtaggcggtttgataagttagaggtgaaatcccggggcttaactccggaactgcctctaatactgttagactagagagtagttgcggtaggcggaatgtatggtgtagcggtgaaatgcttagagatcatacagaacaccgattgcgaaggcagcttaccaaactatatctgacgttgaggcacgaaagcgtggggagcaaacaggattagataccctggtagtccacgcagtaaacgatgataactcgttgtcggcgatacacagtcggtgactaagcgaaagcgataagttatccacctggggagtacgttcgcaagaatgaaactcaaaggaattgacgggggcccgcacaagcggaggaacatgtggtttaattcgatgatacgcgaggaaccttacccgggcttgaaagttactgacgattctggaaacaggatttccctttggggcaggaaactaggtgctgcatggttgtcgtcagctcgtgccgtgaggtgtcgggttaagtcccataacgagcgcaacccctaccgttagttgccatcaggtcaagctgggcactctggcgggactgccggtgtaagccgagaggaaggtggggatgacgtcaaatcagcacggcccttacgtccggggctacacacgtgttacaatggtaggtacagagggtcgctactccgtgaggagatgccaatctcgaaagcctatctcagttcggattggaggctgaaacccgcctccatgaagttggattcgctagtaatcgcgcatcagccatggcgcggtgaatacgttcccgggccttgtacacaccgcccgtcaagccatggaagctgggggtgcctgaagttcgngaccgcaaggag

SEQ ID NO: 194 - DNA, 1388 bp, Ruminococcus faecis
  modified_base (8)..(8): a, c, t, g, unknown or other
  modified_base (116)..(116): a, c, t, g, unknown or other
gcagtcgnacgaagcaccttgttttgatttcttcggaatgaatattttggtgactgagtggcggacgggtgagtaacgcgtgggtaacctgcctcatacggggggataacagttanaaatgactgctaataccgcataacaccacagccccgcggggtgcgggggtaaaaactccggtggtatgagatggacccgcgtctgattaggtatttggtggggtaacggcctaccaagccgactatcagtacccgacctgagagggtgaccggccactttgggactgacacacggcccaaactcctacgggaggcagcagtggggaatattgcacagtgggggaaaccctgatgcagcgaccccgcgtgagcgatgaagtatttcggtatgtaaagctctatcagcggggaagaaaatgacggtacctgactaagaagcaccggctaaatacgtgccagcagccgcggtaatacgtatggtgcaagcgttatccggatttactgggtgtaaagggagcgtagacggagtggcaagtctgatgtgaaaacccggggctcaaccccgggactgcattggaaactgtcaatctagagtaccggagaggtaagcggaattcctagtgtagcggtgaaatgcgtagatattaggaggaacaccagtggcgaaggcggcttactggacggtaactgacgttgaggctcgaaagcgtggggagcaaacaggattagataccctggtagtccacgccgtaaacgatgactactaggtgtcgggcagcaaagctgttcggtgccgcagcaaacgcaataagtagtccacctggggagtacgttcgcaagaatgaaactcaaaggaattgacggggacccgcacaagcggtggagcatgtggtttaattcgaagcaacgcgaagaaccttacctgctcttgacatctccctgaccggcaagtaatgttgcctttccttcgggacagggatgacaggtggtgcatggttgtcgtcagctcgtgtcgtgagatgttgggttaagtcccgcaacgagcgcaacccctatctttagtagccagcggttcggccgggcactctagagagactgccagggataacctggaggaaggtggggatgacgtcaaatcatcatgccccttatgagcagggctacacacgtgctacaatggcgtaaacaaagggaggcagaaccgcgaggtcgagcaaatcccaaaaataacgtctcagttcggattgtagtctgcaactcgactacatgaagctggaatcgctagtaatcgcgaatcagaatgtcgcggtgaatacgttcccgggtcttgtacacaccgcccgtcacaccatgggagtcagtaacgcccgaagtcagtgacccaaccgtaag

SEQ ID NO: 195 - DNA, 1384 bp, Parasutterella excrementihominis
  modified_base (1359)..(1364): a, c, t, g, unknown or other
agaagcttgcttctctccggcgacgagtggcgaacgggtgagtaatacatcggaacgtgtccgctcgtgggggacaaccagccgaaaggttggctaataccgcatgagttctacggaagaaagagggggacccgcaagggcctctcgcgagcggagcggccgatgactgattagccggttggtgaggtaacggctcaccaaagcaacgatcagtagctggtctgagaggacgaccagccacactgggactgagacacggcccagactcctacgggaggcagcagtggggaattttggacaatgggcgcaagcctgatccagctattccgcgtgtgggatgaaggccctcgggttgtaaaccacttttgtagagaacgaaaagacaccttttaaaaaagggtgttgctgacggtactctaagaataagcaccggctaactacgtgccagcagccgcggtaatacgtagggtgcgagcgttaatcggaattactgggcgtaaagggtgcgcaggcggttgagtaagacagatgtgaaatccccgagcttaactcgggaatggcatatgtgactgctcgactagagtgtgtcagagggaggtggaattccacgtgtagcagtgaaatgcgtagatatgtggaagaacaccgatggcgaaggcagcctcctgggacataactgacgctcaggcacgaaagcgtggggagcaaacaggattagataccctggtagtccacgccctaaacgatgttaactagttgttgggaagtaaaattctcagtaacgcagccaacgcgagaagttaaccgcctgggaagtacggtcgcaagactaaaactcaaaggaattgacggggacccgcacaagcggtggatgatgtggattaattcgatgcaacgcgaaaaaccttacctacccttgacatgtcaggaagctcttgtaatgagagtgtgcccgcaagggagcctgaacacaggtgctgcatggctgtcgtcagctcgtgtcgtgagatgttgggttaagtcccgcaacgagcgcaacccttgtcactagttgctacgaaagggcactctagtgagactgccggtgacaaaccggaggaaggtggggatgacgtcaagtcctcatggcccttatgggtagggcttcacacgtcatacaatggtcggaacagagggcagcgaagtcgtgagacggagccaatcccagaaaaccgatcgtagtccggattgcagtctgcaactcgactgcatgaagtcggaatcgctagtaatcgcggatcagcatgccgcggtgaatacgttcccgggtcttgtacacaccgcccgtcaaacaatgggagtggtgtttaccagaagtcnnnnnnctaaccgcaaggagggcggc

SEQ ID NO: 196 - DNA, 1355 bp, Blautia obeum
  modified_base (20)..(20): a, c, t, g, unknown or other
  modified_base (22)..(23): a, c, t, g, unknown or other
  modified_base (917)..(918): a, c, t, g, unknown or other
  modified_base (927)..(929): a, c, t, g, unknown or other
  modified_base (1349)..(1350): a, c, t, g, unknown or other
ttgaagcttcggcagatttngnnggtttctagtggcggacgggtgagtaacgcgtgggtaacctgccttatacagggggataacaaccagaaatggttgctaataccgcataagcgcacaggaccgcatggtccggtgtgaaaaactccggtggtataagatggacccgcgttggattagctagttggcagggtaacggcctaccaaggcgacgatccatagccggcctgagagggtgaacggccacattgggactgagacacggcccagactcctacgggaggcagcagtggggaatattgcacaatgggggaaaccctgatgcagcgacgccgcgtgaaggaagaagtatctcggtatgtaaacttctatcagcagggaagatagtgacggtacctgactaagaagccccggctaactacgtgccagcagccgcggtaatacgtagggggcaagcgttatccggatttactgggtgtaaagggagcgtagacggactggcaagtctgatgtgaaaggcgggggctcaacccctggactgcattggaaactgttagtcttgagtgccggagaggtaagcggaattcctagtgtagcggtgaaatgcgtagatattaggaggaacaccagtggcgaaggcggcttactggacggtaactgacgttgaggctcgaaagcgtggggagcaaacaggattagataccctggtagtccacgccgtaaacgatgaatactaggtgttggggagcaaagctcttcggtgccgccgcaaacgcattaagtattccacctggggagtacgttcgcaagaatgaaactcaaaggaattgacggggacccgcacaagcggtggagcatgtggtttaattcgaagcaacgcgaagaaccttaccaagtcttgacatccctctgaccgnntttaaccgnnnctttccttcgggacaggggagacaggtggtgcatggttgtcgtcagctcgtgtcgtgagatgttgggttaagtcccgcaacgagcgcaacccctatccccagtagccagcagtccggctgggcactctgaggagactgccagggataacctggaggaaggcggggatgacgtcaaatcatcatgccccttatgatttgggctacacacgtgctacaatggcgtaaacaaagggaagcaagcctgcgaaggtaagcaaatcccaaaaataacgtcccagttcggactgcagtctgcaactcgactgcacgaagctggaatcgctagtaatcgcggatcagaatgccgcggtgaatacgttcccgggtcttgtacacaccgcccgtcacaccatgggagtcagtaacgcccgaagtcagtgnnctaac

SEQ ID NO: 197 - DNA, 1367 bp, Bifidobacterium bifidum
  modified_base (6)..(6): a, c, t, g, unknown or other
  modified_base (9)..(9): a, c, t, g, unknown or other
cggganccntcaagcttgcttggtggtgagagtggcgaacgggtgagtaatgcgtgaccgacctgccccatgctccggaatagctcctggaaacgggtggtaatgccggatgttccacatgatcgcatgtgattgtgggaaagattctatcggcgtgggatggggtcgcgtcctatcagcttgttggtgaggtaacggctcaccaaggcttcgacgggtagccggcctgagagggcgaccggccacattgggactgagatacggcccagactcctacgggaggcagcagtggggaatattgcacaatgggcgcaagcctgatgcagcgacgccgcgtgagggatggaggccttcgggttgtaaacctcttttgtttgggagcaagccttcgggtgagtgtacctttcgaataagcgccggctaactacgtgccagcagccgcggtaatacgtagggcgcaagcgttatccggatttattgggcgtaaagggctcgtaggcggctcgtcgcgtccggtgtgaaagtccatcgcttaacggtggatctgcgccgggtacgggcgggctggagtgcggtaggggagactggaattcccggtgtaacggtggaatgtgtagatatcgggaagaacaccgatggcgaaggcaggtctctgggccgtcactgacgctgaggagcgaaagcgtggggagcgaacaggattagataccctggtagtccacgccgtaaacggtggacgctggatgtggggcacgttccacgtgttccgtgtcggagctaacgcgttaagcgtcccgcctggggagtacggccgcaaggctaaaactcaaagaaattgacgggggcccgcacaagcggcggagcatgcggattaattcgatgcaacgcgaagaaccttacctgggcttgacatgttcccgacgacgccagagatggcgtttcccttcggggcgggttcacaggtggtgcatggtcgtcgtcagctcgtgtcgtgagatgttgggttaagtcccgcaacgagcgcaaccctcgccccgtgttgccagcacgttatggtgggaactcacgggggaccgccggggttaactcggaggaaggtggggatgacgtcagatcatcatgccccttacgtccagggcttcacgcatgctacaatggccggtacagcgggatgcgacatggcgacatggagcggatccctgaaaaccggtctcagttcggatcggagcctgcaacccggctccgtgaaggcggagtcgctagtaatcgcggatcagcaacgccgcggtgaatgcgttcccgggccttgtacacaccgcccgtcaagtcatgaaagtgggcagcacccgaagccggtggcctaaccc

SEQ ID NO: 198 - DNA, 1392 bp, Unknown
  Description of Unknown: Lachnoclostridium pacaense sequence
  modified_base (8)..(10): a, c, t, g, unknown or other
  modified_base (1382)..(1383): a, c, t, g, unknown or other
  modified_base (1391)..(1391): a, c, t, g, unknown or other
tgcagtcnnngaagcatcccataggaagttttcggatggaatatgggatgactgagtggcggacgggtgagtaacgcgtggataacctgcctcacactgggggataacagttagaaatggctgctaataccgcataagcgcacagtaccgcatggtacggtgtgaaaaacccaggtggtgtgagatggatccgcgtctgattagccagttggcggggtaacggcccaccaaagcgacgatcagtagccgacctgagagggtgaccggccacattgggactgagacacggcccaaactcctacgggaggcagcagtggggaatattgcacaatgggcgaaagcctgatgcagcgacgccgcgtgagtgaagaagtatctcggtatgtaaagctctatcagcagggaagaaaatgacggtacctgactaagaagccccggctaactacgtgccagcagccgcggtaatacgtagggggcaagcgttatccggatttactgggtgtaaagggagcgtagacggcgatgcaagtctgaagtgaaagcccggggctcaaccccgggactgctttggaaactgtgtggctggagtgcaggagaggtaagtggaattcctagtgtagcggtgaaatgcgtagatattaggaggaacaccagtggcgaaggcggcttactggactgtaactgacgttgaggctcgaaagcgtggggagcaaacaggattagataccctggtagtccacgccgtaaacgatgaatgctaggtgtcggggggcaaagcccctcggtgccgccgctaacgcaataagcattccacctggggagtacgttcgcaagaatgaaactcaaaggaattgacggggacccgcacaagcggtggagcatgtggtttaattcgaagcaacgcgaagaaccttaccaagtcttgacatccccctgaccggacagtaacgtgtcccttccttcgggacaggggagacaggtggtgcatggttgtcgtcagctcgtgtcgtgagatgttgggttaagtcccgcaacgagcgcaacccttatccttagtagccagcacctcgggtgggcactctagggagactgccagggataacctggaggaaggtggggatgacgtcaaatcatcatgccccttatgatttgggctacacacgtgctacaatggcgtaaacaaagggaggcggccctgcgaaggtgagcaaatcccaaaaataacgtcccagttcggactgtagtctgcaacccgactacacgaagctggaatcgctagtaatcgcggatcagaatgccgcggtgaatacgttcccgggtcttgtacacaccgcccgtcacaccatgggagtcagcaacgcccgaagtcagtgacccaaccnnaaggaggna

SEQ ID NO: 199 - DNA, 1396 bp, Clostridium bolteae
tgcagtcgaacgaagcaattaaaatgaagttttcggatggatttttgattgactgagtggcggacgggtgagtaacgcgtggataacctgcctcacactgggggataacagttagaaatgactgctaataccgcataagcgcacagtaccgcagggtacggtgtgaaaaactccggtggtgtgagatggatccgcgtctgattagccagttggcggggtaacggcccaccaaagcgacgatcagtagccgacctgagagggtgaccggccacattgggactgagacacggcccaaactcctacgggaggcagcagtggggaatattgcacaatgggcgaaagcctgatgcagcgacgccgcgtgagtgaagaagtatttcggtatgtaaagctctatcagcagggaagaaaaatgacggtacctgactaagaagccccggctaactacgtgccagcagccgcggtaatacgtagggggcaagcgttatccggatttactgggtgtaaagggagcgtagacggcgaagcaagtctgaagtgaaaacccagggctcaaccctgggactgctttggaaactgttttgctagagtgtcggagaggtaagtggaattcctagtgtagcggtgaaatgcgtagatattaggaggaacaccagtggcgaaggcggcttactggacgataactgacgttgaggctcgaaagcgtggggagcaaacaggattagataccctggtagtccacgccgtaaacgatgaatgctaggtgttgggggggcaaagcccttcggtgccgtcgcaaacgcagtaagcattccacctggggagtacgttcgcaagaatgaaactcaaaggaattgacggggacccgcacaagcggtggagcatgtggtttaattcgaagcaacgcgaagaaccttaccaagtcttgacatcctcttgaccggcgtgtaacggcgccttcccttcggggcaagagagacaggtggtgcatggttgtcgtcagctcgtgtcgtgagatgttgggttaagtcccgcaacgagcgcaacccttatccttagtagccagcaggtaaagctgggcactctagggagactgccagggataacctggaggaaggtggggatgacgtcaaatcatcatgccccttatgatttgggctacacacgtgctacaatggcgtaaacaaagggaagcaagacagtgatgtggagcaaatcccaaaaataacgtcccagttcggactgtagtctgcaacccgactacacgaagctggaatcgctagtaatcgcgaatcagaatgtcgcggtgaatacgttcccgggtcttgtacacaccgcccgtcacaccatgggagtcagcaacgcccgaagtcagtgacccaactcgcaagagagg

SEQ ID NO: 200 - DNA, 1397 bp, Unknown
  Description of Unknown: Longicatena caecimuris sequence
  modified_base (4)..(4): a, c, t, g, unknown or other
  modified_base (20)..(20): a, c, t, g, unknown or other
  modified_base (1393)..(1393): a, c, t, g, unknown or other
tcgnacgaagtctttaggangcttgcttccaaagagacttagtggcgaacgggtgagtaacacgtaggtaacctgcccatgtgcccgggataactgctggaaacggtagctaaaaccggataggtatgagggaggcatcttcctcatattaaagcaccttcgggtgtgaacatggatggacctgcggcgcattagctggttggtgaggtaacggcccaccaaggcgatgatgcgtagccgacctgagagggtgaacggccacattgggactgagacacggcccaaactcctacgggaggcagcagtagggaattttcgtcaatggggggaaccctgaacgagcaatgccgcgtgtgtgaagaaggtcttcggatcgtaaagcactgttgtaagtgaagaatgccacatagaggaaatgctatgtgggtgacggtagcttaccagaaagccacggctaactacgtgccagcagccgcggtaatacgtaggtggcaagcgttatccggaatcattgggcgtaaagggtgcgtaggtggcacgataagtctgaagtaaaaggcaacagctcaactgttgtatgctttggaaactgtcgagctagagtgcagaagagggcgatggaattccatgtgtagcggtaaaatgcgtagatatatggaggaacaccagtggcgaaggcggtcgcctggtctgtaactgacactgatgcacgaaagcgtggggagcaaataggattagataccctagtagtccacgccgtaaacgatgagaactaagtgttggagagattcagtgctgcagttaacgcaataagttctccgcctggggagtatgcacgcaagtgtgaaactcaaaggaattgacgggggcccgcacaagcggtggagtatgtggtttaattcgaagcaacgcgaagaaccttaccaggccttgacatggatataaatgttctagagatagaaagatagctatatatcacacaggtggtgcatggttgtcgtcagctcgtgtcgtgagatgttgggttaagtcccgcaacgagcgcaacccttgtcttctgttaccagcattaggttggggactcaggagagactgccggtgacaaaccggaggaaggtggggatgacgtcaaatcatcatgccccttatggcctgggctacacacgtactacaatggcgcctacaaagagcagcgacaccgcgaggtggagcgaatctcataaagggcgtctcagttcggattgaagtctgcaactcgacttcatgaagtcggaatcgctagtaatcgcagatcagcatgctgcggtgaatacgttctcgggccttgtacacaccgcccgtcaaaccatgggagttggtaatacccgaagccggtggcataaccgcaaggagngagc

SEQ ID NO: 201 - DNA, 1368 bp, Eggerthella lenta
tgcagtcgaacgatgaaaccgccctcgggcggacatgaagtggcgaacgggtgagtaacacgtgaccaacctgcccccctctccgggacaaccttgggaaaccgaggctaataccggatactccctcccctgctcctgcaggggtcgggaaagcccaggcggagggggatggggtcgcggcccattaggtagtaggcggggtaacggcccacctagcccgcgatgggtagccgggttgagagaccgaccggccacattgggactgagatacggcccagactcctacgggaggcagcagtggggaattttgcgcaatgggggaaaccctgacgcagcaacgccgcgtgcgggacgacggccttcgggttgtaaaccgctttcagcagggaagaaattcgacggtacctgcagaagaagctccggctaactacgtgccagcagccgcggtaatacgtagggagcgagcgttatccggattcattgggcgtaaagagcgcgtaggcggcctctcaagcgggatctctaatccgagggctcaacccccggccggatcccgaactgggaggctcgagttcggtagaggcaggcggaattcccggtgtagcggtggaatgcgcagatatcgggaagaacaccgatggcgaaggcagcctgctgggccgcaactgacgctgaggcgcgaaagctaggggagcgaacaggattagataccctggtagtcctagccgtaaacgatggatactaggtgtggggggctccgccctccgtgccgcagccaacgcattaagtatcccgcctggggagtacggccgcaaggctaaaactcaaaggaattgacgggggcccgcacaagcagcggagcatgtggcttaattcgaagcaacgcgaagaaccttaccagggcttgacatggacgtgaagccggggaaacccggtggccgagaggagcgtccgcaggtggtgcatggctgtcgtcagctcgtgtcgtgagatgttgggttaagtcccgcaacgagcgcaacccctgccccatgttgccagcattaggttggggactcatgggggactgccggcgtcaagccggaggaaggtggggacgacgtcaagtcatcatgccctttatgccctgggctgcacacgtgctacaatggccggtacaacgggctgcgagaccgcgaggtcgagcgaatccctcaaagccggccccagttcggatcggaggctgcaacccgcctccgtgaagtcggagttgctagtaatcgcggatcagcatgccgcggtgaatacgttcccgggccttgtacacaccgcccgtcacaccacccgagtcgtctgcacccgaagccgccggccgaacccgcaaggggc

SEQ ID NO: 202 - DNA, 1377 bp, Unknown
  Description of Unknown: Erysipelotrichaceae sp. FBI00202 sequence
  modified_base (6)..(6): a, c, t, g, unknown or other
agtcgnacgcttcacttcggtgaagagtggcgaacgggtgagtaatacataagtaacctggcatctacagggggataactgatggaaacgtcagctaagaccgcataggtgtagagatcgcatgaactctatatgaaaagtgctacgggactggtagatgatggacttatggcgcattagctggttggtagggtaacggcctaccaaggcgacgatgcgtagccgacctgagagggtgaccggccacactgggactgagacacggcccagactcctacgggaggcagcagtagggaattttcggcaatgggggaaaccctgaccgagcaacgccgcgtgaaggaagaagtaattcgttatgtaaacttctgtcatagaggaagaacggtggatatagggaatgatatccaagtgacggtactctataagaaagccacggctaactacgtgccagcagccgcggtaatacgtaggtggcgagcgttatccggaattattgggcgtaaagagggagcaggcggcactaagggtctgtggtgaaagatcgaagcttaacttcggtaagccatggaaaccgtagagctagagtgtgtgagaggatcgtggaattccatgtgtagcggtgaaatgcgtagatatatggaggaacaccagtggcgaaggcgacgatctggcgcataactgacgctcagtcccgaaagcgtggggagcaaataggattagataccctagtagtccacgccgtaaacgatgagtactaagtgttgggagtcaaatctcagtgctgcagttaacgcaataagtactccgcctgagtagtacgttcgcaagaatgaaactcaaaggaattgacgggggcccgcacaagcggtggagcatgtggtttaattcgaagcaacgcgaagaaccttaccaggtcttgacatcgatctaaaggctccagagatggagagatagctatagagaagacaggtggtgcatggttgtcgtcagctcgtgtcgtgagatgttgggttaagtcccgcaacgagcgcaacccctgttgccagttgccagcattaagttggggactctggcgagactgccggtgacaagccggaggaaggcggggatgacgtcaaatcatcatgccccttatgacctgggctacacacgtgctacaatggacagagcagagggaagcgaagccgcgaggtggagcgaaacccataaaactgttctcagttcggactgcagtctgcaactcgactgcacgaagatggaatcgctagtaatcgcgaatcagcatgtcgcggtgaatacgttctcgggccttgtacacaccgcccgtcacaccatgagagtcggtaacacccgaagccggtggcctaaccgcaa

SEQ ID NO: 203 - DNA, 1392 bp, Unknown
  Description of Unknown: Bacteroides kribbi / Bacteroides koreensis species cluster sequence
  modified_base (3)..(3): a, c, t, g, unknown or other
cangtcgaggggcagcattttagtttgcttgcaaactgaagatggcgaccggcgcacgggtgagtaacacgtatccaacctgccgataactccggaatagcctttcgaaagaaagattaataccggatagcatacgaatatcgcatgatatttttattaaagaatttcggttatcgatggggatgcgttccattagtttgttggcggggtaacggcccaccaagactacgatggataggggttctgagaggaaggtcccccacattggaactgagacacggtccaaactcctacgggaggcagcagtgaggaatattggtcaatgggcgagagcctgaaccagccaagtagcgtgaaggatgaaggctctatgggtcgtaaacttcttttatatgggaataaagttttccacgtgtggaattttgtatgtaccatatgaataaggatcggctaactccgtgccagcagccgcggtaatacggaggatccgagcgttatccggatttattgggtttaaagggagcgtaggtggattgttaagtcagttgtgaaagtttgcggctcaaccgtaaaattgcagttgaaactggcagtcttgagtacagtagaggtgggcggaattcgtggtgtagcggtgaaatgcttagatatcacgaagaactccgattgcgaaggcagctcactagactgtcactgacactgatgctcgaaagtgtgggtatcaaacaggattagataccctggtagtccacacagtaaacgatgaatactcgctgtttgcgatatacagtaagcggccaagcgaaagcattaagtattccacctggggagtacgccggcaacggtgaaactcaaaggaattgacgggggcccgcacaagcggaggaacatgtggtttaattcgatgatacgcgaggaaccttacccgggcttaaattgcaacagaatatattggaaacagtatagccgtaaggctgttgtgaaggtgctgcatggttgtcgtcagctcgtgccgtgaggtgtcggcttaagtgccataacgagcgcaacccttatctttagttactaacaggtcatgctgaggactctagagagactgccgtcgtaagatgtgaggaaggtggggatgacgtcaaatcagcacggcccttacgtccggggctacacacgtgttacaatggggggtacagaaggcggctacctggtgacaggatgctaatcccaaaaacctctctcagttcggatcgaagtctgcaacccgacttcgtgaagctggattcgctagtaatcgcgcatcagccatggcgcggtgaatacgttcccgggccttgtacacaccgcccgtcaagccatgaaagccgggggtacctgaagtacgtaaccgcaaggagc

SEQ ID NO: 204 - DNA, 1380 bp, Escherichia flexneri
  modified_base (13)..(14): a, c, t, g, unknown or other
  modified_base (943)..(944): a, c, t, g, unknown or other
  modified_base (947)..(947): a, c, t, g, unknown or other
  modified_base (1360)..(1365): a, c, t, g, unknown or other
agaagcttgcttnntttgctgacgagtggcggacgggtgagtaatgtctgggaaactgcctgatggagggggataactactggaaacggtagctaataccgcataacgtcgcaagaccaaagagggggaccttcgggcctcttgccatcggatgtgcccagatgggattagctagtaggtggggtaacggctcacctaggcgacgatccctagctggtctgagaggatgaccagccacactggaactgagacacggtccagactcctacgggaggcagcagtggggaatattgcacaatgggcgcaagcctgatgcagccatgccgcgtgtatgaagaaggccttcgggttgtaaagtactttcagcggggaggaagggagtaaagttaatacctttgctcattgacgttacccgcagaagaagcaccggctaactccgtgccagcagccgcggtaatacggagggtgcaagcgttaatcggaattactgggcgtaaagcgcacgcaggcggtttgttaagtcagatgtgaaatccccgggctcaacctgggaactgcatctgatactggcaagcttgagtctcgtagaggggggtagaattccaggtgtagcggtgaaatgcgtagagatctggaggaataccggtggcgaaggcggccccctggacgaagactgacgctcaggtgcgaaagcgtggggagcaaacaggattagataccctggtagtccacgccgtaaacgatgtcgacttggaggttgtgcccttgaggcgtggcttccggagctaacgcgttaagtcgaccgcctggggagtacggccgcaaggttaaaactcaaatgaattgacgggggcccgcacaagcggtggagcatgtggtttaattcgatgcaacgcgaagaaccttacctggtcttgacatccacagaagttttcagagatgnnaangtgccttcgggaaccgtgagacaggtgctgcatggctgtcgtcagctcgtgttgtgaaatgttgggttaagtcccgcaacgagcgcaacccttatcctttgttgccagcggtccggccgggaactcaaaggagactgccagtgataaactggaggaaggtggggatgacgtcaagtcatcatggcccttacgaccagggctacacacgtgctacaatggcgcatacaaagagaagcgacctcgcgagagcaagcggacctcataaagtgcgtcgtagtccggattggagtctgcaactcgactccatgaagtcggaatcgctagtaatcgtggatcagaatgccacggtgaatacgttcccgggccttgtacacaccgcccgtcacaccatgggagtgggttgcaaaagaagnnnnnngcttaaccttcggga

SEQ ID NO: 205 - DNA, 1367 bp, Blautia massiliensis
  modified_base (7)..(7): a, c, t, g, unknown or other
  modified_base (15)..(15): a, c, t, g, unknown or other
  modified_base (21)..(23): a, c, t, g, unknown or other
  modified_base (26)..(28): a, c, t, g, unknown or other
  modified_base (919)..(922): a, c, t, g, unknown or other
  modified_base (930)..(931): a, c, t, g, unknown or other
  modified_base (1045)..(1045): a, c, t, g, unknown or other
  modified_base (1047)..(1047): a, c, t, g, unknown or other
attgaancttcggcngatttnnnttnnnttctagtggcggacgggtgagtaacgcgtgggtaacctgccttatacagggggataacagtcagaaatgactgctaataccgcataagcgcacagggccgcatggctcggtgtgaaaaactccggtggtataagatggacccgcgttggattagctggttggtgaggtaacggcccaccaaggcgacgatccatagccggcctgagagggtgaacggccacattgggactgagacacggcccagactcctacgggaggcagcagtggggaatattgcacaatgggggaaaccctgatgcagcgacgccgcgtgaaggaagaagtatctcggtatgtaaacttctatcagcagggaagaaaatgacggtacctgactaagaagccccggctaactacgtgccagcagccgcggtaatacgtagggggcaagcgttatccggatttactgggtgtaaagggagcgtagacggatggacaagtctgatgtgaaaggctggggctcaaccccgggactgcattggaaactgcccgtcttgagtgccggagaggtaagcggaattcctagtgtagcggtgaaatgcgtagatattaggaggaacaccagtggcgaaggcggcttactggacggtaactgacgttgaggctcgaaagcgtggggagcaaacaggattagataccctggtagtccacgcggtaaacgatgaatgctaggtgtcggggagcaaagctcttcggtgccgccgcaaacgcattaagcattccacctggggagtacgttcgcaagaatgaaactcaaaggaattgacggggacccgcacaagcggtggagcatgtggtttaattcgaagcaacgcgaagaaccttaccaagtcttgacatccctctgaccgnnnnttaaccgnntctttccttcgggacagaggagacaggtggtgcatggttgtcgtcagctcgtgtcgtgagatgttgggttaagtcccgcaacgagcgcaacccctatcctcagtagccagcggntnagccgggcactctggggagactgccagggataacctggaggaaggcggggatgacgtcaaatcatcatgccccttatgatttgggctacacacgtgctacaatggcgtaaacaaagggaagcgaacctgcgagggtgggcaaatcccaaaaataacgtcccagttcggactgtagtctgcaacccgactacacgaagctggaatcgctagtaatcgcggatcagaatgccgcggtgaatacgttcccgggtcttgtacacaccgcccgtcacaccatgggagtcagtaacgcccgaagtcagtgacctaaccgcaaggaa

SEQ ID NO: 206 - DNA, 1364 bp, Bacteroides xylanisolvens
gcagtcgaggggcagcattttagtttgcttgcaaactaaagatggcgaccggcgcacgggtgagtaacacgtatccaacctgccgataactcggggatagcctttcgaaagaaagattaatatccgatagtatattaaaaccgcatggttttactattaaagaatttcggttatcgatggggatgcgttccattagtttgttggcggggtaacggcccaccaagactacgatggataggggttctgagaggaaggtcccccacattggaactgagacacggtccaaactcctacgggaggcagcagtgaggaatattggtcaatggacgagagtctgaaccagccaagtagcgtgaaggatgactgccctatgggttgtaaacttcttttatatgggaataaagtattccacgtgtgggattttgtatgtaccatatgaataaggatcggctaactccgtgccagcagccgcggtaatacggaggatccgagcgttatccggatttattgggtttaaagggagcgtaggtggattgttaagtcagttgtgaaagtttgcggctcaaccgtaaaattgcagttgaaactggcagtcttgagtacagtagaggtgggcggaattcgtggtgtagcggtgaaatgcttagatatcacgaagaactccgattgcgaaggcagctcactagactgcaactgacactgatgctcgaaagtgtgggtatcaaacaggattagataccctggtagtccacacagtaaacgatgaatactcgctgtttgcgatatacagtaagcggccaagcgaaagcattaagtattccacctggggagtacgccggcaacggtgaaactcaaaggaattgacgggggcccgcacaagcggaggaacatgtggtttaattcgatgatacgcgaggaaccttacccgggcttaaattgcatttgaataatctggaaacaggttagccgcaagcaaatgtgaaggtgctgcatggttgtcgtcagctcgtgccgtgaggtgtcggcttaagtgccataacgagcgcaacccttatctttagttactaacaggtcatgctgaggactctagagagactgccgtcgtaagatgtgaggaaggtggggatgacgtcaaatcagcacggcccttacgtccggggctacacacgtgttacaatggggggtacagaaggcagctacctggcgacaggatgctaatcccaaaaacctctctcagttcggatcgaagtctgcaacccgacttcgtgaagctggattcgctagtaatcgcgcatcagccatggcgcggtgaatacgttcccgggccttgtacacaccgcccgtcaagccatgaaagccggggg

SEQ ID NO: 207 - DNA, 1389 bp, Parabacteroides merdae
  modified_base (3)..(3): a, c, t, g, unknown or other
  modified_base (17)..(17): a, c, t, g, unknown or other
  modified_base (21)..(22): a, c, t, g, unknown or other
  modified_base (28)..(28): a, c, t, g, unknown or other
  modified_base (31)..(31): a, c, t, g, unknown or other
gcngtcgaggggcagcnatgnnttgtancgntacagattgatggcgaccggcgcacgggtgagtaacgcgtatgcaacttacctatcagagggggatagcccggcgaaagtcggattaataccccataaaacaggggtcccgcatgggaatatttgttaaagattcatcgctgatagataggcatgcgttccattaggcagttggcggggtaacggcccaccaaaccgacgatggataggggttctgagaggaaggtcccccacattggtactgagacacggaccaaactcctacgggaggcagcagtgaggaatattggtcaatggccgagaggctgaaccagccaagtcgcgtgaaggaagaaggatctatggtttgtaaacttcttttataggggaataaagtggaggacgtgtccttttttgtatgtaccctatgaataagcatcggctaactccgtgccagcagccgcggtaatacggaggatgcgagcgttatccggatttattgggtttaaagggtgcgtaggtggtgatttaagtcagcggtgaaagtttgtggctcaaccataaaattgccgttgaaactgggttacttgagtgtgtttgaggtaggcggaatgcgtggtgtagcggtgaaatgcatagatatcacgcagaactccgattgcgaaggcagcttactaaaccataactgacactgaagcacgaaagcgtggggatcaaacaggattagataccctggtagtccacgcagtaaacgatgattactaggagtttgcgatacaatgtaagctctacagcgaaagcgttaagtaatccacctggggagtacgccggcaacggtgaaactcaaaggaattgacgggggcccgcacaagcggaggaacatgtggtttaattcgatgatacgcgaggaaccttacccgggtttgaacgtagtctgaccggagtggaaacactccttctagcaatagcagattacgaggtgctgcatggttgtcgtcagctcgtgccgtgaggtgtcggcttaagtgccataacgagcgcaacccttatcactagttactaacaggtgaagctgaggactctggtgagactgccagcgtaagctgtgaggaaggtggggatgacgtcaaatcagcacggcccttacatccggggcgacacacgtgttacaatggcatggacaaagggcagctacctggtgacaggatgctaatctccaaaccatgtctcagttcggatcggagtctgcaactcgactccgtgaagctggattcgctagtaatcgcgcatcagccatggcgcggtgaatacgttcccgggccttgtacacaccgcccgtcaagccatgggagccgggggtacctgaagtccgtaaccgca

SEQ ID NO: 208 - DNA, 1378 bp, Anaerotruncus massiliensis
  modified_base (5)..(5): a, c, t, g, unknown or other
tcgancggagtgttttcacggaagttttcggatggaagtggttacacttagtggcggacgggtgagtaacacgtgagcaacctgcctttcagagggggataacagttggaaacgactgctaataccgcatgatattaccgggtcacatggcctggcaatcaaaggagcaatccgctgaaagatgggctcgcgtccgattagccagttggcggggtaatggcccaccaaagcgacgatcggtagccggactgagaggttgaacggccacattgggactgagacacggcccagactcctacgggaggcagcagtgggggatattgcacaatgggcgaaagcctgatgcagcgacgccgcgtgagggaagacggtcttcggattgtaaacctctgtcttaggggaagaaaatgacggtaccctaagaggaagctccggctaactacgtgccagcagccgcggtaatacgtagggagcgagcgttgtccggaattactgggtgtaaagggagcgtaggcgggatgccaagtagaatgttaaatccatcggctcaactggtggcagcgttctaaactggcgttcttgagtgaggtagaggcaggcggaattcctagtgtagcggtgaaatgcgtagatattaggaggaacaccagtggcgaaggcggcctgctgggccttaactgacgctgaggctcgaaagcgtggggagcaaacaggattagataccctggtagtccacgccgtaaacgatgattactaggtgtggggggactgaccccttccgtgccgcagttaacacaataagtaatccacctggggagtacggccgcaaggttgaaactcaaaggaattgacgggggcccgcacaagcagtggagtatgtggtttaattcgaagcaacgcgaagaaccttaccaggtcttgacatcggatgcataccatagagatatgggaagcccttcggggcatccagacaggtggtgcatggttgtcgtcagctcgtgtcgtgagatgttgggttaagtcccgcaacgagcgcaacccttattattagttgctacgcaagagcactctaatgagactgccgttgacaaaacggaggaaggtggggatgacgtcaaatcatcatgccccttatgacctgggctacacacgtactacaatggcactcaaacagagggaagcgacaccgcgaggtgaagcggatcccaaaaaagtgtctcagttcggatcgcaggctgcaacccgcctgcgtgaagtcggaattgctagtaatcgcggatcagcatgccgcggtgaatacgttcccgggccttgtacacaccgcccgtcacaccatgggagtcggtaacacccgaagccagtagcctaaccgcaagga

SEQ ID NO: 209 - DNA, 1371 bp, Bacteroides salyersiae
  modified_base (8)..(13): a, c, t, g, unknown or other
  modified_base (33)..(33): a, c, t, g, unknown or other
  modified_base (1362)..(1362): a, c, t, g, unknown or other
tcgagggnnnnnngggtgtagcaatacaccgcntggcgaccggcgcacgggtgagtaacacgtatccaacctgccctttactcggggatagcctttcgaaagaaagattaatacccgatggtataacatgacctcctggttttgttattaaagaatttcggtagaggatggggatgcgttccattaggcagttggcggggtaacggcccaccaaaccttcgatggataggggttctgagaggaaggtcccccacattggaactgagacacggtccaaactcctacgggaggcagcagtgaggaatattggtcaatgggcgagagcctgaaccagccaagtagcgtgaaggatgaccgccctatgggttgtaaacttcttttatatgggaataaagtctgccacgtgtggcattttgtatgtaccatatgaataaggatcggctaactccgtgccagcagccgcggtaatacggaggatccgagcgttatccggatttattgggtttaaagggagcgtaggtggacatgtaagtcagttgtgaaagtttgcggctcaaccgtaaaattgcagttgaaactgcgtgtcttgagtacagtagaggtgggcggaattcgtggtgtagcggtgaaatgcttagatatcacgaagaactccgattgcgaaggcagctcactggactgcaactgacactgatgctcgaaagtgtgggtatcaaacaggattagataccctggtagtccacacagtaaacgatgaatactcgctgtttgcgatatacagtaagcggccaagcgaaagcattaagtattccacctggggagtacgccggcaacggtgaaactcaaaggaattgacgggggcccgcacaagcggaggaacatgtggtttaattcgatgatacgcgaggaaccttacccgggcttaaattgcaaatgaatatgccggaaacggcatagccgcaaggcatttgtgaaggtgctgcatggttgtcgtcagctcgtgccgtgaggtgtcggcttaagtgccataacgagcgcaacccttatcttcagttactaacaggtcatgctgaggactctggagagactgccgtcgtaagatgtgaggaaggtggggatgacgtcaaatcagcacggcccttacgtccggggctacacacgtgttacaatggggggtacagaaggccgctacacagcgatgtgatgccaatccctaaagcccctctcagttcggatcgaagtctgcaacccgacttcgtgaagctggattcgctagtaatcgcgcatcagccacggcgcggtgaatacgttcccgggccttgtacacaccgcccgtcaagccatgggagccgggggtacctnaagtacgta

SEQ ID NO: 210 - DNA, 1386 bp, Bifidobacterium bifidum
tgcagtcgaacgggatccatcaagcttgcttggtggtgagagtggcgaacgggtgagtaatgcgtgaccgacctgccccatgctccggaatagctcctggaaacgggtggtaatgccggatgttccacatgatcgcatgtgattgtgggaaagattctatcggcgtgggatggggtcgcgtcctatcagcttgttggtgaggtaacggctcaccaaggcttcgacgggtagccggcctgagagggcgaccggccacattgggactgagatacggcccagactcctacgggaggcagcagtggggaatattgcacaatgggcgcaagcctgatgcagcgacgccgcgtgagggatggaggccttcgggttgtaaacctcttttgtttgggagcaagccttcgggtgagtgtacctttcgaataagcgccggctaactacgtgccagcagccgcggtaatacgtagggcgcaagcgttatccggatttattgggcgtaaagggctcgtaggcggctcgtcgcgtccggtgtgaaagtccatcgcttaacggtggatctgcgccgggtacgggcgggctggagtgcggtaggggagactggaattcccggtgtaacggtggaatgtgtagatatcgggaagaacaccgatggcgaaggcaggtctctgggccgtcactgacgctgaggagcgaaagcgtggggagcgaacaggattagataccctggtagtccacgccgtaaacggtggacgctggatgtggggcacgttccacgtgttccgtgtcggagctaacgcgttaagcgtcccgcctggggagtacggccgcaaggctaaaactcaaagaaattgacgggggcccgcacaagcggcggagcatgcggattaattcgatgcaacgcgaagaaccttacctgggcttgacatgttcccgacgacgccagagatggcgtttcccttcggggcgggttcacaggtggtgcatggtcgtcgtcagctcgtgtcgtgagatgttgggttaagtcccgcaacgagcgcaaccctcgccccgtgttgccagcacgttatggtgggaactcacgggggaccgccggggttaactcggaggaaggtggggatgacgtcagatcatcatgccccttacgtccagggcttcacgcatgctacaatggccggtacagcgggatgcgacatggcgacatggagcggatccctgaaaaccggtctcagttcggatcggagcctgcaacccggctccgtgaaggcggagtcgctagtaatcgcggatcagcaacgccgcggtgaatgcgttcccgggccttgtacacaccgcccgtcaagtcatgaaagtgggcagcacccgaagccggtggcctaaccccttgtggga

SEQ ID NO: 211 - DNA, 1385 bp, Bacteroides vulgatus
  modified_base (22)..(22): a, c, t, g, unknown or other
  modified_base (326)..(326): a, c, t, g, unknown or other
tcgaggggcagcatggtcttancttgctaaggccgatggcgaccggcgcacgggtgagtaacacgtatccaacctgccgtctactcttggacagccttctgaaaggaagattaatacaagatggcatcatgagtccgcatgttcacatgattaaaggtattccggtagacgatggggatgcgttccattagatagtaggcggggtaacggcccacctagtcttcgatggataggggttctgagaggaaggtcccccacattggaactgagacacggtccaaactcctacgggaggcagcagtgaggaatattggtcaatgggcganagcctgaaccagccaagtagcgtgaaggatgactgccctatgggttgtaaacttcttttataaaggaataaagtcgggtatgtatacccgtttgcatgtactttatgaataaggatcggctaactccgtgccagcagccgcggtaatacggaggatccgagcgttatccggatttattgggtttaaagggagcgtagatggatgtttaagtcagttgtgaaagtttgcggctcaaccgtaaaattgcagttgatactggatatcttgagtgcagttgaggcaggcggaattcgtggtgtagcggtgaaatgcttagatatcacgaagaactccgattgcgaaggcagcctgctaagctgcaactgacattgaggctcgaaagtgtgggtatcaaacaggattagataccctggtagtccacacggtaaacgatgaatactcgctgtttgcgatatactgcaagcggccaagcgaaagcgttaagtattccacctggggagtacgccggcaacggtgaaactcaaaggaattgacgggggcccgcacaagcggaggaacatgtggtttaattcgatgatacgcgaggaaccttacccgggcttaaattgcagatgaattacggtgaaagccgtaagccgcaaggcatctgtgaaggtgctgcatggttgtcgtcagctcgtgccgtgaggtgtcggcttaagtgccataacgagcgcaacccttgttgtcagttactaacaggttccgctgaggactctgacaagactgccatcgtaagatgtgaggaaggtggggatgacgtcaaatcagcacggcccttacgtccggggctacacacgtgttacaatggggggtacagagggccgctaccacgcgagtggatgccaatccccaaaacctctctcagttcggactggagtctgcaacccgactccacgaagctggattcgctagtaatcgcgcatcagccacggcgcggtgaatacgttcccgggccttgtacacaccgcccgtcaagccatgggagccgggggtacctgaagtgcgtaaccgcgagga

SEQ ID NO: 212 - DNA, 1379 bp, Clostridium aldenense
  modified_base (934)..(935): a, c, t, g, unknown or other
  modified_base (944)..(945): a, c, t, g, unknown or other
  modified_base (1372)..(1372): a, c, t, g, unknown or other
  modified_base (1378)..(1378): a, c, t, g, unknown or other
tgcagtcgaacgaagcgattaggaggaagttttcggatggattcctggttgactgagtggcggacgggtgagtaacgcgtggataacctgcctcacactgggggataacagttagaaatggctgctaataccgcataagcgcacagtaccgcatggtacggtgtgaaaaacccaggtggtgtgagatggatccgcgtctgattagccagttggcggggtaacggcccaccaaagcgacgatcagtagccgacctgagagggtgaccggccacgttgggactgagacagggcccaaactcctaggggaggcagcagtggggaatattgcacaatgggcgcaagcctgatgcagcgacgccgcgtgagtgaagaagtatctcggtatgtaaagctctatcagcagggaagaaaatgacggtacctgactaagaagccccggctaactacgtgccagcagccgcggtaatacgtagggggcaagcgttatccggatttactgggtgtaaagggagcgtagacggcgacgcaagtctggagtgaaagcccggggcccaaccccgggactgctttggaaactgtgttgctggagtgcaggagaggtaagtggaattcctagtgtagcggtgaaatgcgtagatattaggaggaacaccagtggcgaaggcggcttactggactgtaactgacgttgaggctcgaaagcgtggggagcaaacaggattagataccctggtagtccacgccgtaaacgatgaatgctaggtgtcggggggcaaagcccttcggtgccgccgctaacgcaataagcattccacctggggagtacgttcgcaagaatgaaactcaaaggaattgacggggacccgcacaagcggtggagcatgtggtttaattcgaagcaacgcgaagaaccttaccaagtcttgacatcctnntgaccggcnngtaacggtgcctttccttcgggacaagagagacaggtggtgcatggttgtcgtcagctcgtgtcgtgagatgttgggttaagtcccgcaacgagcgcaacccttatccttagtagccagcacgtcgtggtgggcactctagggagactgccagggataacctggaggaaggtggggatgacgtcaaatcatcatgccccttatgatttgggctacacacgtgctacaatggcgtaaacaaagggaggcgaccctgcgaaggcaagcaaatcccaaaaataacgtcccagttcggactgtagtctgcaacccgactacacgaagctggaatcgctagtaatcgcggatcagaatgccgcggtgaatacgttcccgggtcttgtacacaccgcccgtcacaccatgggagtcagcaacgcccgaagtcnagtganc

SEQ ID NO: 213 - DNA, 1385 bp, Ruminococcus bromii
  modified_base (1383)..(1383): a, c, t, g, unknown or other
gtcgaacggaactgttttgaaagatttcttcggaatgaatttgatttagtttagtggcggacgggtgagtaacgcgtgagtaacctgccttcaagagggggataacattctgaaaagaatgctaataccgcatgacatatcggaaccacatggttttgatatcaaagattttatcgcttgaagatggactcgcgtccgattagttagttggtgaggtaacggctcaccaagaccgcgatcggtagccggactgagaggttgaacggccacattgggactgagacacggcccagactcctacgggaggcagcagtgggggatattgcgcaatgggggcaaccctgacgcagcaacgccgcgtgaaggatgaaggttttcggattgtaaacttcttttattaaggacgaaaattgacggtacttaatgaataagctccggctaactacgtgccagcagccgcggtaatacgtagggagcaagcgttgtccggatttactgggtgtaaagggtgcgtaggcggctttgcaagtcagatgtgaaatctatgggctcaacccataaactgcatttgaaactgtagagcttgagtgaagtagaggcaggcggaattccccgtgtagcggtgaaatgcgtagagatggggaggaacaccagtggcgaaggcggcctgctgggctttaactgacgctgaggcacgaaagcgtgggtagcaaacaggattagataccctggtagtccacgctgtaaacgatgattactaggtgtggggggtctgaccccttccgtgccggagttaacacaataagtaatccacctggggagtacggccgcaaggttgaaactcaaaggaattgacgggggcccgcacaagcagtggagtatgtggtttaattcgaagcaacgcgaagaaccttaccaggtcttgacatccaactaacgaagtagagatacattaggtgcccttcggggaaagttgagacaggtggtgcatggttgtcgtcagctcgtgtcgtgagatgttgggttaagtcccgcaacgagcgcaacccttgctattagttgctacgcaagagcactctaataggactgccgttgacaaaacggaggaaggtggggacgacgtcaaatcatcatgccccttatgacctgggctacacacgtactacaatggatgttaacagagggaagcaagacagtgatgtggagcaaacccctaaaaacattctcagttcagattgcaggctgcaacccgcctgcatgaagatggaattgctagtaatcgcggatcagaatgccgcggtgaatacgttcccgggccttgtacacaccgcccgtcacaccatgggagccggtaatacccgaagtcagtagtccaacctcgtnag

SEQ ID NO: 214 - DNA, 1367 bp, Blautia obeum
  modified_base (915)..(916): a, c, t, g, unknown or other
  modified_base (918)..(918): a, c, t, g, unknown or other
  modified_base (926)..(927): a, c, t, g, unknown or other
gaagcttcggcagatttggctggtttctagtggcggacgggtgagtaacgcgtgggtaacctgccttatacagggggataacaaccagaaatggttgctaataccgcataagcgcacaggaccgcatggtccggtgtgaaaaactccggtggtataagatggacccgcgttggattagctagttggcagggtaacggcctaccaaggcgacgatccatagccggcctgagagggtgaacggccacattgggactgagacacggcccagactcctacgggaggcagcagtggggaatattgcacaatgggggaaaccctgatgcagcgacgccgcgtgaaggaagaagtatctcggtatgtaaacttctatcagcagggaagatagtgacggtacctgactaagaagccccggctaactacgtgccagcagccgcggtaatacgtagggggcaagcgttatccggatttactgggtgtaaagggagcgtagacggactggcaagtctgatgtgaaaggcgggggctcaacccctggactgcattggaaactgttagtcttgagtgccggagaggtaagcggaattcctagtgtagcggtgaaatgcgtagatattaggaggaacaccagtggcgaaggcggcttactggacggtaactgacgttgaggctcgaaagcgtggggagcaaacaggattagataccctggtagtccacgccgtaaacgatgaatactaggtgttggggagcaaagctcttcggtgccgccgcaaacgcattaagtattccacctggggagtacgttcgcaagaatgaaactcaaaggaattgacggggacccgcacaagcggtggagcatgtggtttaattcgaagcaacgcgaagaaccttaccaagtcttgacatccctctgaccgnntnttaaccgnntctttccttcgggacaggggagacaggtggtgcatggttgtcgtcagctcgtgtcgtgagatgttgggttaagtcccgcaacgagcgcaacccctatccccagtagccagcagtccggctgggcactctgaggagactgccagggataacctggaggaaggcggggatgacgtcaaatcatcatgccccttatgatttgggctacacacgtgctacaatggcgtaaacaaagggaagcaagcctgcgaaggtaagcaaatcccaaaaataacgtcccagttcggactgcagtctgcaactcgactgcacgaagctggaatcgctagtaatcgcggatcagaatgccgcggtgaatacgttcccgggtcttgtacacaccgcccgtcacaccatgggagtcagtaacgcccgaagtcagtgacctaactgcaaagaaggag

SEQ ID NO: 215 - DNA, 1388 bp, Eubacterium rectale
  modified_base (3)..(5): a, c, t, g, unknown or other
  modified_base (7)..(7): a, c, t, g, unknown or other
  modified_base (954)..(954): a, c, t, g, unknown or other
  modified_base (1372)..(1372): a, c, t, g, unknown or other
tcnnncnaagcactttatttgatttccttcgggactgattattttgtgactgagtggcggacgggtgagtaacgcgtgggtaacctgccttgtacagggggataacagttggaaacggctgctaataccgcataagcgcacggcatcgcatgatgcagtgtgaaaaactccggtggtataagatggacccgcgttggattagctagttggtgaggtaacggcccaccaaggcgacgatccatagccgacctgagagggtgaccggccacattgggactgagacacggcccaaactcctacgggaggcagcagtggggaatattgcacaatgggcgaaagcctgatgcagcgacgccgcgtgagcgaagaagtatttcggtatgtaaagctctatcagcagggaagataatgacggtacctgactaagaagcaccggctaaatacgtgccagcagccgcggtaatacgtatggtgcaagcgttatccggatttactgggtgtaaagggagcgcaggcggtgcggcaagtctgatgtgaaagcccggggctcaaccccggtactgcattggaaactgtcgtactagagtgtcggaggggtaagcggaattcctagtgtagcggtgaaatgcgtagatattaggaggaacaccagtggcgaaggcggcttactggacgataactgacgctgaggctcgaaagcgtggggagcaaacaggattagataccctggtagtccacgccgtaaacgatgaatactaggtgttgggaagcattgcttctcggtgccgtcgcaaacgcagtaagtattccacctggggagtacgttcgcaagaatgaaactcaaaggaattgacgggggacccgcacaagcggtggagcatgtggtttaattcgaagcaacgcgaagaaccttaccaagtcttgacatccttctgaccggtacttaaccgtacnttctcttcggagcaggagtgacaggtggtgcatggttgtcgtcagctcgtgtcgtgagatgttgggttaagtcccgcaacgagcgcaacccttatctttagtagccagcggttcggccgggcactctagagagactgccagggataacctggaggaaggcggggatgacgtcaaatcatcatgccccttatgacttgggctacacacgtgctacaatggcgtaaacaaagggaagcaaagctgtgaagccgagcaaatctcaaaaataacgtctcagttcggactgtagtctgcaacccgactacacgaagctggaatcgctagtaatcgcagatcagaatgctgcggtgaatacgttcccgggtcttgtacacaccgcccgtcacaccatgggagttgggaatgcccgaagccagtnacctaaccgaaaggaa

SEQ ID NO: 216 - DNA, 1381 bp, Blautia faecis
  modified_base (10)..(10): a, c, t, g, unknown or other
  modified_base (15)..(17): a, c, t, g, unknown or other
  modified_base (38)..(38): a, c, t, g, unknown or other
  modified_base (44)..(47): a, c, t, g, unknown or other
tgcagtcgancgggnnncattttattgaagcttcggcngatttnnnnttgtttctagtggcggacgggtgagtaacgcgtgggtaacctgccttatactgggggataacagccagaaatgactgctaataccgcataagcgcacagaaccgcatggttccgtgtgaaaaactccggtggtataagatggacccgcgttggattagctagttggcagggcagcggcctaccaaggcgacgatccatagccggcctgagagggtgaacggccacattgggactgagacacggcccagactcctacgggaggcagcagtggggaatattgcacaatgggggaaaccctgatgcagcgacgccgcgtgaaggaagaagtatctcggtatgtaaacttctatcagcagggaagataatgacggtacctgactaagaagccccggctaactacgtgccagcagccgcggtaatacgtagggggcaagcgttatccggatttactgggtgtaaagggagcgtagacggcgcagcaagtctgatgtgaaaggcaggggcttaacccctggactgcattggaaactgctgtgcttgagtgccggaggggtaagcggaattcctagtgtagcggtgaaatgcgtagatattaggaggaacaccagtggcgaaggcggcttactggacggtaactgacgttgaggctcgaaagcgtggggagcaaacaggattagataccctggtagtccacgccgtaaacgatgaatactaggtgtcagggagcacagctctttggtgccgccgcaaacgcattaagtattccacctggggagtacgttcgcaagaatgaaactcaaaggaattgacggggacccgcacaagcggtggagcatgtggtttaattcgaagcaacgcgaagaaccttaccaaatcttgacatccctctgaccgggacttaaccgtccctttccttcgggacaggggagacaggtggtgcatggttgtcgtcagctcgtgtcgtgagatgttgggttaagtcccgcaacgagcgcaacccctatccttagtagccagcacgtaatggtgggcactctgaggagactgccagggataacctggaggaaggcggggatgacgtcaaatcatcatgccccttatgatttgggctacacacgtgctacaatggcgtaaacaaagggaagcgaacccgcgagggtgggcaaatctcaaaaataacgtcccagttcggactgcagtctgcaactcgactgcacgaagctggaatcgctagtaatcgcggatcagaatgccgcggtgaatacgttcccgggtcttgtacacaccgcccgtcacaccatgggagtcagtaacgcccgaagtcagtgacctaa

SEQ ID NO: 217 - DNA, 1383 bp, Alistipes shahii
  modified_base (26)..(26): a, c, t, g, unknown or other
  modified_base (28)..(29): a, c, t, g, unknown or other
  modified_base (31)..(33): a, c, t, g, unknown or other
  modified_base (76)..(79): a, c, t, g, unknown or other
  modified_base (81)..(81): a, c, t, g, unknown or other
  modified_base (1375)..(1376): a, c, t, g, unknown or other
tgcagtcgaggggcagcacggtgtancnngnnnctggtggcgacgggcgcacgggtgcgtaacgcgtatgcaaccnnnncntaacagggggataacactgagaaattggtactaataccccataacatcaggaccggcatcggttctggttgaaaactccggtggttatggatgggcatgcgttgtattagctggttggtgaggtaacggctcaccaaggcaacgatacatagggggactgagaggttaaccccccacattggtactgagacacggaccaaactcctacgggaggcagcagtgaggaatattggtcaatggacgcaagtctgaaccagccatgccgcgtgcaggaagacggctctatgagttgtaaactgcttttgtacgagagtaaacgctcttacgtgtaagagcctgaaagtatcgtacgaataaggatcggctaactccgtgccagcagccgcggtaatacggaggatccaagcgttatccggatttattgggtttaaagggtgcgtaggcggtttgataagttagaggtgaaataccggtgcttaacaccggaactgcctctaatactgttgaactagagagtagttgcggtaggcggaatgtatggtgtagcggtgaaatgcttagagatcatacagaacaccgattgcgaaggcagcttaccaaactatatctgacgttgaggcacgaaagcgtggggagcaaacaggattagataccctggtagtccacgcagtaaacgatgataactcgctgtcggcgatacacagtcggcggctaagcgaaagcgataagttatccacctggggagtacgttcgcaagaatgaaactcaaaggaattgacgggggcccgcacaagcggaggaacatgtggtttaattcgatgatacgcgaggaaccttacccgggcttgaaagttactgacgattctggaaacaggatttcccttcggggcaggaaactaggtgctgcatggttgtcgtcagctcgtgccgtgaggtgtcgggttaagtcccataacgagcgcaacccctaccgttagttgccatcaggtcaagctgggcactctggcgggactgccggtgtaagccgagaggaaggtggggatgacgtcaaatcagcacggcccttacgtccggggctacacacgtgttacaatggtaggtacagagggcagctacccagtgatgggatgcgaatctcgaaagcctatctcagttcggatcggaggctgaaacccgcctccgtgaagttggattcgctagtaatcgcgcatcagccatggcgcggtgaatacgttcccgggccttgtacacaccgcccgtcaagccatggaagctgggggtgcctgaagttcgnnaccgcaa

SEQ ID NO: 218 - DNA, 1382 bp, Bacteroides uniformis
  modified_base (13)..(13): a, c, t, g, unknown or other
  modified_base (17)..(17): a, c, t, g, unknown or other
  modified_base (23)..(23): a, c, t, g, unknown or other
  modified_base (32)..(32): a, c, t, g, unknown or other
aggggcagcatgnactntagctntgctaagtnttgatggcgaccggcgcacgggtgagtaacacgtatccaacctgccgatgactcggggatagcctttcgaaagaaagattaatacccgatggcatagttcttccgcatggtagaactattaaagaatttcggtcatcgatggggatgcgttccattaggttgttggcggggtaacggcccaccaagccttcgatggataggggttctgagaggaaggtcccccacattggaactgagacacggtccaaactcctacgggaggcagcagtgaggaatattggtcaatggacgagagtctgaaccagccaagtagcgtgaaggatgactgccctatgggttgtaaacttcttttatacgggaataaagtgaggcacgcgtgcctttttgtatgtaccgtatgaataaggatcggctaactccgtgccagcagccgcggtaatacggaggatccgagcgttatccggatttattgggtttaaagggagcgtaggcggacgcttaagtcagttgtgaaagtttgcggctcaaccgtaaaattgcagttgatactgggtgtcttgagtacagtagaggcaggcggaattcgtggtgtagcggtgaaatgcttagatatcacgaagaactccgattgcgaaggcagcctgctggactgtaactgacgctgatgctcgaaagtgtgggtatcaaacaggattagataccctggtagtccacacagtaaacgatgaatactcgctgtttgcgatatacggtaagcggccaagcgaaagcgttaagtattccacctggggagtacgccggcaacggtgaaactcaaaggaattgacgggggcccgcacaagcggaggaacatgtggtttaattcgatgatacgcgaggaaccttacccgggcttgaattgcaactgaatgatgtggagacatgtcagccgcaaggcagttgtgaaggtgctgcatggttgtcgtcagctcgtgccgtgaggtgtcggcttaagtgccataacgagcgcaacccttatcgatagttaccatcaggttatgctggggactctgtcgagactgccgtcgtaagatgtgaggaaggtggggatgacgtcaaatcagcacggcccttacgtccggggctacacacgtgttacaatggggggtacagaaggcagctacacggcgacgtgatgctaatcccgaaagcctctctcagttcggattggagtctgcaacccgactccatgaagctggattcgctagtaatcgcgcatcagccacggcgcggtgaatacgttcccgggccttgtacacaccgcccgtcaagccatgaaagccgggggtacctgaagtgcgtaaccgcaag

SEQ ID NO: 219 - DNA, 1388 bp, Roseburia hominis
  modified_base (9)..(10): a, c, t, g, unknown or other
tgcagtcgnncgaagcactttaattgatttcttcggaatgaagtttttgtgactgagtggcggacgggtgagtaacgcgtgggtaacctgcctcatacagggggataacagttggaaacgactgctaataccgcataagcgcacaggattgcatgatccagtgtgaaaaactccggtggtatgagatggacccgcgtctgattagccagttggcggggtaacggcccaccaaagcgacgatcagtagccgacctgagagggtgaccggccacattgggactgagacacggcccaaactcctacgggaggcagcagtggggaatattgcacaatgggggaaaccctgatgcagcgacgccgcgtgagcgaagaagtatttcggtatgtaaagctctatcagcagggaagaagaatgacggtacctgactaagaagcaccggctaaatacgtgccagcagccgcggtaatacgtatggtgcaagcgttatccggatttactgggtgtaaagggagcgcaggcggtacggcaagtctgatgtgaaatcccggggctcaaccccggtactgcattggaaactgtcggactagagtgtcggaggggtaagtggaattcctagtgtagcggtgaaatgcgtagatattaggaggaacaccagtggcgaaggcggcttactggacgattactgacgctgaggctcgaaagcgtggggagcaaacaggattagataccctggtagtccacgccgtaaacgatgaatactaggtgtcggggagcattgctcttcggtgccgcagcaaacgcaataagtattccacctggggagtacgttcgcaagaatgaaactcaaaggaattgacggggacccgcacaagcggtggagcatgtggtttaattcgaagcaacgcgaagaaccttaccaagtcttgacatcccactgacaaagtatgtaatgtactttctcttcggagcagtggtgacaggtggtgcatggttgtcgtcagctcgtgtcgtgagatgttgggttaagtcccgcaacgagcgcaacccctattcttagtagccagcggttcggccgggcactctagggagactgccagggataacctggaggaaggtggggatgacgtcaaatcatcatgccccttatgacttgggctacacacgtgctacaatggcgtaaacaaagggaagcaatcccgcgagggggagcaaatctcaaaaataacgtctcagttcggactgtagtctgcaactcgactacacgaagctggaatcgctagtaatcgcgaatcagaatgtcgcggtgaatacgttcccgggtcttgtacacaccgcccgtcacaccatgggagttggtaatgcccgaagtcagtgacccaaccgcaag

SEQ ID NO: 220 - DNA, 1417 bp, Megasphaera massiliensis
  modified_base (5)..(5): a, c, t, g, unknown or other
  modified_base (15)..(16): a, c, t, g, unknown or other
  modified_base (35)..(36): a, c, t, g, unknown or other
  modified_base (312)..(312): a, c, t, g, unknown or other
  modified_base (492)..(496): a, c, t, g, unknown or other
tcgancgagaagagnngagaagcttgcttcttatnnattcgagtggcaaacgggtgagtaacgcgtaagcaacctgcccttcagatggggacaacagctggaaacggctgctaataccgaatacgttctttccgccgcatgacggaatgaagaaagggaggccttcgggctttcgctggaggaggggcttgcgtctgattagctggttggaggggtaacggcccaccaaggcgacgatcagtagccggtctgagaggatgaacggccacattgggactgagacacggcccagactcctacgggaggcagcantggggaatcttccgcaatggacgaaagtctgacggagcaacgccgcgtgaacgatgacggccttcgggttgtaaagttctgttatatgggacgaacagggcatcggttaatacccggtgtctttgacggtaccgtaagagaaagccacggctaactacgtgccagcagccgcggtaatannnnngtggcaagcgttgtccggaattattgggcgtaaagggcgcgcaggcggcatcgcaagtcggtcttaaaagtgcgggggcttaaccccgtgaggggaccgaaactgtgaagctcgagtgtcggagaggaaagcggaattcctagtgtagcggtgaaatgcgtagatattaggaggaacaccagtggcgaaagcggctttctggacgacaactgacgctgaggcgcgaaagccaggggagcaaacgggattagataccccggtagtcctggccgtaaacgatggatactaggtgtaggaggtatcgactccttctgtgccggagttaacgcaataagtatcccgcctgggggagtacggccgcaaggctgaaactcaaaggaattgacgggggcccgcacaagcggtggagtatgtggtttaattcgacgcaacgcgaagaaccttaccaagccttgacattgattgctacggaaagagatttccggttcttcttcggaagacaagaaaacaggtggtgcacggctgtcgtcagctcgtgtcgtgagatgttgggttaagtcccgcaacgagcgcaacccctatcttctgttgccagcacctcgggtggggactcagaagagactgccgcagacaatgcggaggaaggcggggatgacgtcaagtcatcatgccccttatggcttgggctacacacgtactacaatggctcttaatagagggaagcgaaggagcgatccggagcaaaccccaaaaacagagtcccagttcggattgcaggctgcaactcgcctgcatgaagcaggaatcgctagtaatcgcaggtcagcatactgcggtgaatacgttcccgggccttgtacacaccgcccgtcacaccacgaaagtcattcacacccgaagccggtgaggcaaccgcaagga

SEQ ID NO: 221 - DNA, 1378 bp, Butyricimonas faecihominis
  modified_base (12)..(12): a, c, t, g, unknown or other
  modified_base (14)..(16): a, c, t, g, unknown or other
  modified_base (397)..(398): a, c, t, g, unknown or other
  modified_base (409)..(410): a, c, t, g, unknown or other
  modified_base (930)..(932): a, c, t, g, unknown or other
  modified_base (940)..(940): a, c, t, g, unknown or other
cgaggggcagcngnnngtagcaatacttcgccggcgaccggcgcacgggtgagtaacacgtgtgcaaccaaccccgtaccgggagataacccgcggaaacgtggactaacatcccataatactggaggatcgcatgatctttcatttaaaattccggtggtacgggacgggcacgcgcgacattaggtagttggcggggtaacggcccaccaagccgacgatgtctaggggttctgagaggaaggtcccccacactggaactgagacacggtccagactcctacgggaggcagcagtgaggaatattggtcaatgggcgagagcctgaaccagccaagtcgcgtgagggaagaatggtccatggcctgtaaacctcttttgtcaaggaagaataaanngcacgtgtgcnntcttgccagtacttgacgaataagcatcggctaactccgtgccagcagccgcggtaatacgggggatgcgagcgttatccggatttattgggtttaaagggcgcgtaggcgggacgccaagtcagcggtaaaagactgcagctaaactgtagcacgccgttgaaactggcgacctcgagacgagacgagggaggcggaacaagtgaagtagcggtgaaatgcttagatatcacttggaaccccgatagcgaaggcagcttcccaggctcgatctgacgctgatgcgcgagagcgtgggtagcgaacaggattagataccctggtagtccacgccgtaaacgatgctcactggatcttggcgatacactgccagggttcaagcgaaagtattaagtgagccacctggggagtacgtcggcaacgatgaaactcaaaggaattgacgggggcccgcacaagcggaggaacatgtggtttaattcgatgatacgcgaggaaccttacccgggtttaaatgtannntgcatgtnttggaaacaggaattcccttcggggctagatacaaggtgctgcatggttgtcgtcagctcgtgccgtgaggtgtcgggttaagtcccataacgagcgcaacccctatcgccagttgccatcggttgaagccgggcactctgtcgagactgccaccgtaaggtgcgaggaaggcggggatgacgtcaaatcagcacggcccttacacccggggcgacacacgtgttacaatggccggtacagagggcagccacggggtgacccggagcgaatctctaaagccggtcgtagttcggactggagtctgcaacccgactccacgaagttggattcgctagtaatcgcgcatcagccatggcgcggtgaatacgttcccgggccttgtacacaccgcccgtcaagccatggaagccgggagtacctgaagatcgtgaccgcga

SEQ ID NO: 222 - DNA, 1381 bp, Alistipes onderdonkii
tcgaggggcatcacgaggtagcaatactttggtggcgaccggcgcacgggtgcgtaacgcgtatgtaacctacctataacaggggcataacactgagaaattggtactaattccccataatattcggagaggcatctctccgggttgaaaactccggtggttatagatggacatgcgttgtattagctagttggtgaggtaacggctcaccaaggcaacgatacatagggggactgagaggttaaccccccacactggtactgagacacggaccagactcctacgggaggcagcagtgaggaatattggtcaatggacgcaagtctgaaccagccatgccgcgtgcaggaagacggctctatgagttgtaaactgcttttgtacgagggtaaactcacctacgtgtaggtgactgaaagtatcgtacgaataaggatcggctaactccgtgccagcagccgcggtaatacggaggattcaagcgttatccggatttattgggtttaaagggtgcgtaggcggtttgataagttagaggtgaaatcccggggcttaactccggaactgcctctaatactgttagactagagagtagttgcggtaggcggaatgtatggtgtagcggtgaaatgcttagagatcatacagaacaccgattgcgaaggcagcttaccaaactatatctgacgttgaggcacgaaagcgtggggagcaaacaggattagataccctggtagtccacgcagtaaacgatgataactcgttgtcggcgatacacagtcggtgactaagcgaaagcgataagttatccacctggggagtacgttcgcaagaatgaaactcaaaggaattgacgggggcccgcacaagcggaggaacatgtggtttaattcgatgatacgcgaggaaccttacccgggcttgaaagttactgacgattctggaaacaggatttccctttggggcaggaaactaggtgctgcatggttgtcgtcagctcgtgccgtgaggtgtcgggttaagtcccataacgagcgcaacccctaccgttagttgccatcaggtcaagctgggcactctggcgggactgccggtgtaagccgagaggaaggtggggatgacgtcaaatcagcacggcccttacgtccggggctacacacgtgttacaatggtaggtacagagggtcgctactccgtgaggggatgccaatctcgaaagcctatctcagttcggattggaggctgaaacccgcctccatgaagttggattcgctagtaatcgcgcatcagccatggcgcggtgaatacgttcccgggccttgtacacaccgcccgtcaagccatggaagctgggggtgcctgaagttcgtgaccgcaagga

SEQ ID NO: 223 - DNA, 1383 bp, Alistipes onderdonkii
  modified_base (3)..(3): a, c, t, g, unknown or other
  modified_base (1199)..(1199): a, c, t, g, unknown or other
tgnaagtcgaggggcatcacgaggtagcaatactttggtggcgaccggcgcacgggtgcgtaacgcgtatgtaacctacctataacaggggcataacactgagaaattggtactaattccccataatattcggagaggcatctctccgggttgaaaactccggtggttatagatggacatgcgttgtattagctagttggtgaggtaacggctcaccaaggcaacgatacatagggggactgagaggttaaccccccacactggtactgagacacggaccagactcctacgggaggcagcagtgaggaatattggtcaatggacgcaagtctgaaccagccatgccgcgtgcaggaagacggctctatgagttgtaaactgcttttgtacgagggtaaactcacctacgtgtaggtgactgaaagtatcgtacgaataaggatcggctaactccgtgccagcagccgcggtaatacggaggattcaagcgttatccggatttattgggtttaaagggtgcgtaggcggtttgataagttagaggtgaaatcccggggcttaactccggaactgcctctaatactgttagactagagagtagttgcggtaggcggaatgtatggtgtagcggtgaaatgcttagagatcatacagaacaccgattgcgaaggcagcttaccaaactatatctgacgttgaggcacgaaagcgtggggagcaaacaggattagataccctggtagtccacgcagtaaacgatgataactcgttgtcggcgatacacagtcggtgactaagcgaaagcgataagttatccacctggggagtacgttcgcaagaatgaaactcaaaggaattgacgggggcccgcacaagcggaggaacatgtggtttaattcgatgatacgcgaggaaccttacccgggcttgaaagttactgacgattctggaaacaggatttccctttggggcaggaaactaggtgctgcatggttgtcgtcagctcgtgccgtgaggtgtcgggttaagtcccataacgagcgcaacccctaccgttagttgccatcaggtcaagctgggcactctggcgggactgccggtgtaagccgagaggaaggtggggatgacgtcaaatcagcacggcccttacgtccggggctacacacgtgttacaatggtaggtacagagggtcgctacnccgtgaggagatgccaatctcgaaagcctatctcagttcggattggaggctgaaacccgcctccatgaagttggattcgctagtaatcgcgcatcagccatggcgcggtgaatacgttcccgggccttgtacacaccgcccgtcaagccatggaagctgggggtgcctgaagttcgtgaccgca

SEQ ID NO: 224 - DNA, 1391 bp, Sutterella wadsworthensis
  modified_base (944)..(944): a, c, t, g, unknown or other
  modified_base (946)..(946): a, c, t, g, unknown or other
tcgaacggcagcgcggggagcttgctccctggcggcgagtggcgcacgggtgagtaatacatcggaacgtgtcttctagtgggggataactgcccgaaagggcagctaataccgcatgagacctgagggtgaaagcgggggatcgcaagacctcgcgctggaagagcggccgatgtccgattagctagttggtgaggtaaaggctcaccaaggcgacgatcggtagctggtctgagaggacgaccagccacactgggactgagacacggcccagactcctacgggaggcagcagtggggaattttggacaatgggggcaaccctgatccagccatgccgcgtgcaggatgaaggtcttcggattgtaaactgcttttgtcagggacgaaaagggatgcgataacaccgcattccgctgacggtacctgaagaataagcaccggctaactacgtgccagcagccgcggtaatacgtagggtgcaagcgttaatcggaattactgggcgtaaagcgtgcgcaggcggttctgtaagatagatgtgaaatccccgggctcaacctgggaattgcatatatgactgcaggacttgagtttgtcagaggagggtggaattccacgtgtagcagtgaaatgcgtagatatgtggaagaacaccgatggcgaaggcagccctctgggacatgactgacgctcatgcacgaaagcgtgggggagcaaacaggattagataccctggtagtccacgccctaaacgatgtctactagttgttggggacgatagtccttggtaacgcagctaacgcgtgaagtagaccgcctggggagtacggtcgcaagattaaaactcaaaggaattgacggggacccgcacaagcggtggatgatgtggattaattcgatgcaacgcgaaaaaccttacctagccttgacatgccaggaagncntgagagatcaggccgtgcccgcaagggaatctggacacaggtgctgcatggctgtcgtcagctcgtgtcgtgagatgttgggttaagtcccgcaacgagcgcaacccttgtcattagttgctacgaaagggcactctaatgagactgccggtgacaaaccggaggaaggtggggatgacgtcaagtcctcatggcccttatggctagggcctcacacgtcatacaatggtcggaacagagggaagcgaagccgcgaggtgaagccaatcccagaaaaccgatcgtagtccggattgcagtctgcaactcgactgcatgaagtcggaatcgctagtaatcgcggatcagcatgccgcggtgaatacgttcccgggtcttgtacacaccgcccgtcacaccatgggagtggggttcaccagaagacgtttgcccaaccgaaaggaag

SEQ ID NO: 225 - DNA, 1428 bp, Phascolarctobacterium faecium
  modified_base (2)..(5): a, c, t, g, unknown or other
  modified_base (1022)..(1024): a, c, t, g, unknown or other
  modified_base (1421)..(1421): a, c, t, g, unknown or other
  modified_base (1427)..(1427): a, c, t, g, unknown or other
annnntgcagtcgaacggagaattttatttcggtagaattcttagtggcgaacgggtgagtaacgcgtaggcaacctgccctttagacggggacaacattccgaaaggagtgctaataccggatgtgatcatcgtgccgcatggcaggatgaagaaagatggcctctacaagtaagctatcgctaaaggatgggcctgcgtctgattagctagttggtagtgtaacggactaccaaggcgatgatcagtagccggtctgagaggatgaacggccacattgggactgagacacggcccaaactcctacgggaggcagcagtggggaatcttccgcaatggacgaaagtctgacggagcaacgccgcgtgagtgatgaaggatttcggtctgtaaagctctgttgtttatgacgaacgtgcagtgtgtgaacaatgcattgcaatgacggtagtaaacgaggaagccacggctaactacgtgccagcagccgcggtaatacgtaggtggcgagcgttgtccggaattattgggcgtaaagagcatgtaggcggcttaataagtcgagcgtgaaaatgcggggctcaaccccgtatggcgctggaaactgttaggcttgagtgcaggagaggaaaggggaattcccagtgtagcggtgaaatgcgtagatattgggaggaacaccagtggcgaaggcgcctttctggactgtgtctgacgctgagatgcgaaagccagggtagcgaacgggattagataccccggtagtcctggccgtaaacgatgggtactaggtgtaggaggtatcgaccccttctgtgccggagttaacgcaataagtaccccgcctggggagtacggccgcaaggttgaaactcaaaggaattgacgggggcccgcacaagcggtggagtatgtggtttaattcgacgcaacgcgaagaaccttaccaaggcttgacattgattgaacgctctagagatagagctttcccttcggggacaagaaaacaggtggtgcatggnnntcgtcagctcgtgtcgtgagatgttgggttaagtcccgcaacgagcgcaacccctatcctatgttaccagcaagtaaagttggggactcatgggagactgccagggacaacctggaggaaggcggggatgacgtcaagtcatcatgccccttatgtcttgggctacacacgtactacaatggtcggaaacagagggaagcgaagccgcgaggcagagcaaaccccagaaacccgatctcagttcggatcgcaggctgcaacccgcctgcgtgaagtcggaatcgctagtaatcgcaggtcagcatactgcggtgaatacgttcccgggccttgtacacaccgcccgtcacaccacgaaagttggtaacacccgaagccggtgaggtaacctattagnagccanc

SEQ ID NO: 226 - DNA, 1398 bp, Unknown
  Description of Unknown: Catabacter hongkongensis sequence
  modified_base (13)..(13): a, c, t, g, unknown or other
tgcagtcgacganttgctctttgggaagccctcgggtggaactgtgagtatacttagtggcggacgggtgagtaacgcgtgagcaatctgccctgcaatgggggacaacagttggaaacgactgctaataccgcataagaccacgaaaccgcatggtttagaggtaaaaggattcattcgatgcaggatgagctcgcgtcccattagatagttggtgaggtaacggcccaccaagtcaacgatgggtagccgacctgagagggtgatcggccacattggaactgagaaacggtccaaactcctacgggaggcagcagtggggaatattgggcaatgggggaaaccctgacccagcaacgccgcgtgaaggaagaaggccttcgggttgtaaacttttgtcctatgggacgaaaaaaatgacggtaccataggaggaagctccggctaactacgtgccagcagccgcggtaatacgtagggagcaagcgttgtccggaattactgggcgtaaagggtgcgtaggtggccatgtaagtcaggtgtgaaagaccggggctcaaccccggggttgcacttgaaactgtgtggcttgagtacaggagagggaagtggaattcctagtgtagcggtgaaatgcgtagatattaggaggaacaccagtggcgaaggcgactttctggactgtaactgacactgaggcacgaaagcgtggggagcaaacaggattagataccctggtagtccacgccgtaaacgatggatactaggtgtggggggcgatagtcctccgtgccgaagctaacgcattaagtatcccgcctggggagtacgatcgcaaggttgaaactcaaaggaattgacgggggcccgcacaagcagcggagcatgtggtttaattcgaagcaacgcgaagaaccttaccaaggcttgacatcctctgacgcatatagagatatatgttcccttcggggcagagagacaggtggtgcatggttgtcgtcagctcgtgtcgtgagatgttgggttaagtcccgcaacgagcgcaacccttgttgctagttgccagcacgtaaaggtgggaactctagtgagactgccggggacaactcggaggaaggtggggacgacgtcaaatcatcatgccccttatgtcttgggctacacacgtgctacaatggccggtacaaagggcagcgacctcgtaagagtaagcgaatctcaaaaagccggccccagttcggattgtgggctgcaacccgcccacatgaagtcggagttgctagtaatcgcgaatcagcatgtcgcggtgaatgcgttcccgggccttgtacacaccgcccgtcacaccacggaagttgggagcacccgaagccagtggcttaaccgtaaggagagagc

SEQ ID NO: 227 - DNA, 1378 bp, Bacteroides cellulosilyticus
  modified_base (952)..(952): a, c, t, g, unknown or other
tcgaggggcagcatgacctagcaataggttgatggcgaccggcgcacgggtgagtaacacgtatccaacctaccggttattccgggatagcctttcgaaagaaagattaataccggatagtataacgagaaggcatctttttgttattaaagaatttcgataaccgatggggatgcgttccattagtttgttggcggggtaacggcccaccaagacatcgatggataggggttctgagaggaaggtcccccacattggaactgagacacggtccaaactcctacgggaggcagcagtgaggaatattggtcaatggacgagagtctgaaccagccaagtagcgtgaaggatgactgccctatgggttgtaaacttcttttatatgggaataaagtgagccacgtgtggctttttgtatgtaccatacgaataaggatcggctaactccgtgccagcagccgcggtaatacggaggatccgagcgttatccggatttattgggtttaaagggagcgtaggcggactattaagtcagctgtgaaagtttgcggctcaaccgtaaaattgcagttgatactggtcgtcttgagtgcagtagaggtaggcggaattcgtggtgtagcggtgaaatgcttagatatcacgaagaactccgattgcgaaggcagcttactggactgtaactgacgctgatgctcgaaagtgtgggtatcaaacaggattagataccctggtagtccacacagtaaacgatgaatactcgctgtttgcgatatacagcaagcggccaagcgaaagcattaagtattccacctggggagtacgccggcaacggtgaaactcaaaggaattgacgggggcccgcacaagcggaggaacatgtggtttaattcgatgatacgcgaggaaccttacccgggcttaaattgcaaatgaatatagtggaaacatnatagccgcaaggcatttgtgaaggtgctgcatggttgtcgtcagctcgtgccgtgaggtgtcggcttaagtgccataacgagcgcaacccttatctttagttactaacaggtcatgctgaggactctagagagactgccgtcgtaagatgtgaggaaggtggggatgacgtcaaatcagcacggcccttacgtccggggctacacacgtgttacaatggggggtacagaaggcagctacacagtgatgtgatgctaatcccaaaagcctctctcagttcggattggagtctgcaacccgactccatgaagctggattcgctagtaatcgcgcatcagccacggcgcggtgaatacgttcccgggccttgtacacaccgcccgtcaagccatgaaagccgggggtacctgaagtccgtaaccgcaag

SEQ ID NO: 228 - DNA, 1367 bp, Collinsella aerofaciens
  modified_base (2)..(3): a, c, t, g, unknown or other
  modified_base (5)..(5): a, c, t, g, unknown or other
  modified_base (33)..(34): a, c, t, g, unknown or other
anncntgcagtcgaacggcacctgccctcgggnngaagcgagtggcgaacggctgagtaacacgtggagaacctgccccctcccccgggatagccgcccgaaaggacgggtaataccggataccccggggtgccgcatggcaccccggctaaagccccgacgggaggggatggctccgcggcccatcaggtagacggcggggtgacggcccaccgtgccgacaacgggtagccgggttgagagaccgaccggccagattgggactgagacacggcccagactcctacgggaggcagcagtggggaatcttgcgcaatggggggaaccctgacgcagcgacgccgcgtgcgggacggaggccttcgggtcgtaaaccgctttcagcagggaagagtcaagactgtacctgcagaagaagccccggctaactacgtgccagcagccgcggtaatacgtagggggcgagcgttatccggattcattgggcgtaaagcgcgcgtaggcggcccggcaggccgggggtcgaagcggggggctcaacccccccgaagcccccggaacctccgcggcttgggtccggtaggggagggtggaacacccggtgtagcggtggaatgcgcagatatcgggtggaacaccggtggcgaaggcggccctctgggccgagaccgacgctgaggcgcgaaagctgggggagcgaacaggattagataccctggtagtcccagccgtaaacgatggacgctaggtgtggggggacgatccccccgtgccgcagccaacgcattaagcgtcccgcctggggagtacggccgcaaggctaaaactcaaaggaattgacgggggcccgcacaagcagcggagcatgtggcttaattcgaagcaacgcgaagaaccttaccagggcttgacatatgggtgaagcgggggagaccccgtggccgagaggagcccatacaggtggtgcatggctgtcgtcagctcgtgtcgtgagatgttgggttaagtcccgcaacgagcgcaacccccgccgcgtgttgccatcgggtgatgccgggaacccacgcgggaccgccgccgtcaaggcggaggagggcggggacgacgtcaagtcatcatgccccttatgccctgggctgcacacgtgctacaatggccggtacagagggatgccaccccgcgagggggagcggatcccggaaagccggccccagttcggattgggggctgcaacccgcccccatgaagtcggagttgctagtaatcgcggatcagcatgccgcggtgaatgcgttcccgggccttgtacacaccgcccgtcacaccacccgagtcgtctgcacccgaagtcgccggcccaaccgaga

SEQ ID NO: 229 - DNA, 1395 bp, Alistipes senegalensis
  modified_base (7)..(8): a, c, t, g, unknown or other
  modified_base (20)..(24): a, c, t, g, unknown or other
  modified_base (26)..(27): a, c, t, g, unknown or other
  modified_base (32)..(32): a, c, t, g, unknown or other
  modified_base (46)..(48): a, c, t, g, unknown or other
  modified_base (992)..(992): a, c, t, g, unknown or other
  modified_base (1382)..(1382): a, c, t, g, unknown or other
  modified_base (1391)..(1391): a, c, t, g, unknown or other
tgcagtnngaggggcagcgnnnnngnngctgngcttcaattgccgnnnaccggcgcacgggtgcgtaacgcgtatgcgaccgtacccataacagggggataacactgagaaattggtactaatatcccataacatcatgaggggcatcccttttggttgaaaactccggtggttatggatgggcatgcgttgtattagctggttggtgaggtaacggctcaccaaggcgacgatacatagggggactgagaggttaaccccccacattggtactgagacacggaccaaactcctacgggaggcagcagtgaggaatattggtcaatggacgcaagtctgaaccagccatgccgcgtgcaggatgacggctctatgagttgtaaactgcttttgtacgagggtaaacccggatacgtgtatccggctgaaagtatcgtacgaataaggatcggctaactccgtgccagcagccgcggtaatacggaggattcaagcgttatccggatttattgggtttaaagggtgcgtaggcggtttgataagttagaggtgaaataccggtgcttaacaccggaactgcctctaatactgttgagctagagagtagttgcggtaggcggaatgtatggtgtagcggtgaaatgcttagagatcatacagaacaccgattgcgaaggcagcttaccaaactatatctgacgttgaggcacgaaagcgtggggagcaaacaggattagataccctggtagtccacgcagtaaacgatgataactcgctgtcggcgatacacagtcggtggctaagcgaaagcgataagttatccacctggggagtacgttcgcaagaatgaaactcaaaggaattgacgggggcccgcacaagcggaggaacatgtggtttaattcgatgatacgcgaggaaccttacccgggcttgaaagttactgacgattctggaaacaggatttcccttcggggcaggaaactaggtgntgcatggttgtcgtcagctcgtgccgtgaggtgtcgggttaagtcccataacgagcgcaacccctaccgttagttgccatcaggtcaagctgggcactctggcgggactgccggtgtaagccgagaggaaggtggggatgacgtcaaatcagcacggcccttacgtccggggctacacacgtgttacaatggtaggtacagagggcagctacccagtgatgggatgcaaatctcgaaagcctatctcagttcggattggaggctgaaacccgcctccatgaagttggattcgctagtaatcgcgcatcagccatggcgcggtgaatacgttcccgggccttgtacacaccgcccgtcaagccatggaagctgggggtgcctgaagttcgngaccgcaangagc

SEQ ID NO: 230 - DNA, 1383 bp, Unknown
  Description of Unknown: Eisenbergiella tayi sequence
tcgaacgaagttacacagaggaagttttcggatggaatcagtataacttagtggcggacgggtgagtaacgcgtgggaaacctgccctgtaccgggggataacacttagaaataggtgctaataccgcataagcgcacggaaccgcatggttctgtgtgaaaaactccggtggtacaggatggtcccgcgtctgattagccagttggcagggtaacggcctaccaaagcgacgatcagtagccggcctgagagggtgaacggccacattgggactgagacacggcccaaactcctacgggaggcagcagtggggaatattgcacaatgggggaaaccctgatgcagcgacgccgcgtgagtgaagaagtatttcggtatgtaaagctctatcagcagggaagaaaatgacggtacctgactaagaagccccggctaactacgtgccagcagccgcggtaatacgtagggggcaagcgttatccggatttactgggtgtaaagggagcgtagacggcatggcaagccagatgtgaaaacccaggggctcaaccttgggattgcatttggaactgcccaggctggagtgcaggagaggtaagcggaattcctagtgtagcggtgaaatgcgtagatattaggaggaacaccagtggcgaaggcggcttactggactgtaactgacgttgaggctcgaaagcgtggggagcaaacaggattagataccctggtagtccacgcggtaaacgatgattgctaggtgtaggtgggtatggacccatcggtgccgcagctaacgcaataagcaatccacctggggagtacgttcgcaagaatgaaactcaaaggaattgacggggacccgcacaagcggtggagcatgtggtttaattcgaagcaacgcgaagaaccttaccaagtcttgacatcccaatgacgcacctgtaaagagtgttcccttcggggcaatggagacaggtggtgcatggttgtcgtcagctcgtgtcgtgagatgttgggttaagtcccgcaacgagcgcaacccttattcttagtagccagcaggtagagctgggcactctaaggagactgccggggataacccggaggaaggcggggatgacgtcaaatcatcatgccccttatgatttgggctacacacgtgctacaatggcgtaaacaaagggaagcgagacagtgatgtggagcaaatcccagaaataacgtctcagttcggattgtagtctgcaactcgactacatgaagctggaatcgctagtaatcgcgaatcagcatgtcgcggtgaatacgttcccgggtcttgtacacaccgcccgtcacaccatgggagttggaaatgcccgaagtctgtgacctaaccgaaa

SEQ ID NO: 231 - DNA, 1354 bp, Parabacteroides distasonis
  modified_base (3)..(3): a, c, t, g, unknown or other
  modified_base (27)..(27): a, c, t, g, unknown or other
  modified_base (83)..(83): a, c, t, g, unknown or other
  modified_base (296)..(296): a, c, t, g, unknown or other
  modified_base (1345)..(1345): a, c, t, g, unknown or other
  modified_base (1353)..(1353): a, c, t, g, unknown or other
cgnggtggcgaccggcgcacgggtgantaacgcgtatgcaacttacctatcagagggggataacccggcgaaagtcggactantaccgcatgaagcaggggccccgcatggggatatttgctaaagattcatcgctgatagataggcatgcgttccattaggcagttggcggggtaacggcccaccaaaccgacgatggataggggttctgagaggaaggtcccccacattggtactgagacacggaccaaactcctacgggaggcagcagtgaggaatattggtcaatgggcganaggctgaaccagccaagtcgcgtgagggatgaaggttctatggatcgtaaacctcttttataagggaataaagtgcgggacgtgtcccgttttgtatgtaccttatgaataaggatcggctaactccgtgccagcagccgcggtaatacggaggatccgagcgttatccggatttattgggtttaaagggtgcgtaggcggccttttaagtcagcggtgaaagtctgtggctcaaccatagaattgccgttgaaactggggggcttgagtatgtttgaggcaggcggaatgcgtggtgtagcggtgaaatgcatagatatcacgcagaaccccgattgcgaaggcagcctgccaagccattactgacgctgatgcacgaaagcgtggggatcaaacaggattagataccctggtagtccacgcagtaaacgatgatcactagctgtttgcgatacactgtaagcggcacagcgaaagcgttaagtgatccacctggggagtacgccggcaacggtgaaactcaaaggaattgacgggggcccgcacaagcggaggaacatgtggtttaattcgatgatacgcgaggaaccttacccgggtttgaacgcattcggaccgaggtggaaacaccttttctagcaatagccgtttgcgaggtgctgcatggttgtcgtcagctcgtgccgtgaggtgtcggcttaagtgccataacgagcgcaacccttgccactagttactaacaggtaaagctgaggactctggtgggactgccagcgtaagctgcgaggaaggcggggatgacgtcaaatcagcacggcccttacatccggggcgacacacgtgttacaatggcgtggacaaagggaagccacctggcgacagggagcgaatccccaaaccacgtctcagttcggatcggagtctgcaacccgactccgtgaagctggattcgctagtaatcgcgcatcagccatggcgcggtgaatacgttcccgggccttgtacacaccgcccgtcaagccatgggagccgggggtacctgaagtccntaaccgcna

SEQ ID NO: 232 - DNA, 1377 bp, Bacteroides stercoris
  modified_base (1369)..(1369): a, c, t, g, unknown or other
gcagtcgaggggcagcatcatcaaagcttgctttgatggatggcgaccggcgcacgggtgagtaacacgtatccaacctgccgacaacactgggatagcctttcgaaagaaagattaataccggatggcatagttttcccgcatgggataattattaaagaatttcggttgtcgatggggatgcgttccattaggcagttggcggggtaacggcccaccaaaccaacgatggataggggttctgagaggaaggtcccccacattggaactgagacacggtccaaactcctacgggaggcagcagtgaggaatattggtcaatggacgagagtctgaaccagccaagtagcgtgaaggatgactgccctatgggttgtaaacttcttttatacgggaataaagttagccacgtgtggctttttgtatgtaccgtatgaataaggatcggctaactccgtgccagcagccgcggtaatacggaggatccgagcgttatccggatttattgggtttaaagggagcgtaggcgggttgttaagtcagttgtgaaagtttgcggctcaaccgtaaaattgcagttgatactggcgaccttgagtgcaacagaggtaggcggaattcgtggtgtagcggtgaaatgcttagatatcacgaagaactccgattgcgaaggcagcttactggattgtaactgacgctgatgctcgaaagtgtgggtatcaaacaggattagataccctggtagtccacacagtaaacgatgaatactcgctgttggcgatatacagtcagcggccaagcgaaagcattaagtattccacctggggagtacgccggcaacggtgaaactcaaaggaattgacgggggcccgcacaagcggaggaacatgtggtttaattcgatgatacgcgaggaaccttacccgggcttaaattgcaactgactgaaccggaaacggttctttcttcggacagttgtgaaggtgctgcatggttgtcgtcagctcgtgccgtgaggtgtcggcttaagtgccataacgagcgcaacccttatcgatagttactagcaggtcatgctgaggactctattgagactgccgtcgtaagatgtgaggaaggtggggatgacgtcaaatcagcacggcccttacgtccggggctacacacgtgttacaatggggggtacagaaggcagctacacggcgacgtggtgctaatcccgaaagcctctctcagttcggattggagtctgcaacccgactccatgaagctggattcgctagtaatcgcgcatcagccacggcgcggtgaatacgttcccgggccttgtacacaccgcccgtcaagccatgaaagccgggggtacctnaagtacgt

SEQ ID NO: 233 - DNA, 1417 bp, Unknown
  Description of Unknown: Ruminococcaceae sp. FBI00233 sequence
gtcgaacggagacactctgttcactgaatggtagaaggcggcggaaccagaaagggagcgtcggttttctactgttgagtgaatagagtgtcttagtggcggacgggtgagtaacgcgtgaataacctgccttgcagtggggaataacacaccgaaaggtgtgctaataccgcatgatgtaaggggaaggcatcttccccttaccaaagatttatcgctgtgagatggattcgcgtccgattagatagttggtgaggtaacggcccaccaagtcgacgatcggtagccggactgagaggttgaacggccacattgggactgagacacggcccagactcctacgggaggcagcagtgggggatattgcacaatgggcgcaagcctgatgcagcgacgccgcgtgtgggaagacggccctcgggttgtaaaccactggctttggggacgataatgacggtacccaaggaggaagctccggctaactacgtgccagcagccgcggtaatacgtagggagcgagcgttgtccggaattactgggtgtaaagggagcgtaggcgggagtgcaagttgaatgtttaatctatgggctcaacccatatcagcgttcaaaactgcatttcttgagtgaagtagaggttggcggaattcctagtgtagcggtgaaatgcgtagatattaggaggaacaccagtggcgaaggcggccaactgggcttttactgacgctgaggctcgaaagcgtggggagcaaacaggattagataccctggtagtccacgccgtaaacgatgaatactaggtgtggggggactgaccccttccgtgccgcagttaacacaataagtattccacctggggagtacggccgcaaggctgaaactcaaaggaattgacgggggcccgcacaagcagtggattatgtggtttaattcgaagcaacgcgaagaaccttaccaggccttgacatctcctgagtagcctagagataggtgatgcccttcggggcaggaagacaggtggtgcatggttgtcgtcagctcgtgtcgtgagatgttgggttaagtcccgcaacgagcgcaacccttacggatagttgctacgcaagagcactctatcaggactgccgttgacaaaacggaggaaggtggggatgacgtcaaatcatcatgccccttatggcctgggctacacacgtaatacaatggcgtttaacagagggaagcaagaccgcgaggtggagcgaatcctcaaaaggcgtctcagttcagattgcaggctgcaacccgcctgcatgaagtcggaattgctagtaatcgcggatcagcatgccgcggtgaatacgttctcgggccttgtacacaccgcccgtcacaccatggaagtcggtaacacccgaagtcagtagcctaaccgcaa

SEQ ID NO: 234 - DNA, 1394 bp, Unknown
  Description of Unknown: Faecalicatena contorta sequence
  modified_base (13)..(13): a, c, t, g, unknown or other
  modified_base (1384)..(1384): a, c, t, g, unknown or other
  modified_base (1386)..(1387): a, c, t, g, unknown or other
tgcagtcgagcgnagcgctttacttagatttcttcggattgaaaagttttgcgactgagcggcggacgggtgagtaacgcgtgggtaacctgcctcatacagggggataacagttagaaatgactgctaataccgcataagaccacagtaccgcatggtacagtgggaaaaactccggtggtatgagatggacccgcgtctgattagctagttggtaaggtaacggcttaccaaggcgacgatcagtagccgacctgagagggtgaccggccacattgggactgagacacggcccaaactcctacgggaggcagcagtggggaatattgcacaatgggggaaaccctgatgcagcgacgccgcgtgaaggatgaagtatttcggtatgtaaacttctatcagcagggaagaaaatgacggtacctgactaagaagccccggctaactacgtgccagcagccgcggtaatacgtagggggcaagcgttatccggatttactgggtgtaaagggagcgtagacggttatgtaagtctgatgtgaaaacccggggctcaaccccgggactgcattggaaactatgtaactagagtgtcggagaggtaagtggaattcctagtgtagcggtgaaatgcgtagatattaggaggaacaccagtggcgaaggcggcttactggacgatgactgacgttgaggctcgaaagcgtggggagcaaacaggattagataccctggtagtccacgccgtaaacgatgcatactaggtgtcgggtggcaaagccattcggtgccgcagcaaacgcaataagtatgccacctggggagtacgttcgcaagaatgaaactcaaaggaattgacggggacccgcacaagcggtggagcatgtggtttaattcgaagcaacgcgaagaaccttacctgctcttgacatccccctgaccggcgcgtaatggtgcctttccttcgggacaggggagacaggtggtgcatggttgtcgtcagctcgtgtcgtgagatgttgggttaagtcccgcaacgagcgcaacccttatctttagtagccagcggtttggccgggcactctagagagactgccagggataacctggaggaaggtggggatgacgtcaaatcatcatgccccttatgagcagggctacacacgtgctacaatggcgtaaacaaagggaggcgaagccgcgaggtggagcaaatcccaaaaataacgtctcagttcggattgtagtctgcaactcgactacatgaagctggaatcgctagtaatcgcgaatcagaatgtcgcggtgaatacgttcccgggtcttgtacacaccgcccgtcacaccatgggagttggtaacgcccgaagtcagtgacccaacngnnaaggagg

SEQ ID NO: 235 - DNA, 1387 bp, Alistipes shahii
  modified_base (4)..(4): a, c, t, g, unknown or other
tgcngtcgaggggcagcacggtgtagcaatacactggtggcgaccggcgcacgggtgcgtaacgcgtatgcaacctacccataacagggggataacactgagaaattggtactaataccccataacatcaggaccggcatcggttctggttgaaaactccggtggttatggatgggcatgcgttgtattagctggttggtgaggtaacggctcaccaaggcaacgatacatagggggactgagaggttaaccccccacattggtactgagacacggaccaaactcctacgggaggcagcagtgaggaatattggtcaatggacgcaagtctgaaccagccatgccgcgtgcaggaagacggctctatgagttgtaaactgcttttgtacgagagtaaacgctcttacgtgtaagagcctgaaagtatcgtacgaataaggatcggctaactccgtgccagcagccgcggtaatacggaggatccaagcgttatccggatttattgggtttaaagggtgcgtaggcggtttgataagttagaggtgaaataccggtgcttaacaccgggactgcctctaatactgttgaactagagagtagttgcggtaggcggaatgtatggtgtagcggtgaaatgcttagagatcatacagaacaccgattgcgaaggcagcttaccaaactatatctgacgttgaggcacgaaagcgtggggagcaaacaggattagataccctggtagtccacgcagtaaacgatgataactcgctgtcggcgatacacagtcggcggctaagcgaaagcgataagttatccacctggggagtacgttcgcaagaatgaaactcaaaggaattgacgggggcccgcacaagcggaggaacatgtggtttaattcgatgatacgcgaggaaccttacccgggcttgaaagttactgacgattctggaaacaggatttcccttcggggcaggaaactaggtgctgcatggttgtcgtcagctcgtgccgtgaggtgtcgggttaagtcccataacgagcgcaacccctaccgttagttgccatcaggtcaagctgggcactctggcgggactgccggtgtaagccgagaggaaggtggggatgacgtcaaatcagcacggcccttacgtccggggctacacacgtgttacaatggtaggtacagagggcagctacccagtgatgggatgcgaatctcgaaagcctatctcagttcggatcggaggctgaaacccgcctccgtgaagttggattcgctagtaatcgcgcatcagccatggcgcggtgaatacgttcccgggccttgtacacaccgcccgtcaagccatggaagctgggggtgcctgaagttcgtgaccgcaaggag

SEQ ID NO: 236 - DNA, 1392 bp, Unknown
  Description of Unknown: Eisenbergiella tayi sequence
  modified_base (8)..(11): a, c, t, g, unknown or other
  modified_base (1356)..(1356): a, c, t, g, unknown or other
  modified_base (1389)..(1389): a, c, t, g, unknown or other
tgcagtcnnnnaagttacacagaggaagttttcggatggaatcagtataacttagtggcggacgggtgagtaacgcgtgggaaacctgccctgtaccgggggataacacttagaaataggtgctaataccgcataagcgcacggaaccgcatggttctgtgtgaaaaactccggtggtacaggatggtcccgcgtctgattagccagttggcagggtaacggcctaccaaagcgacgatcagtagccggcctgagagggtgaacggccacattgggactgagacacggcccaaactcctacgggaggcagcagtggggaatattgcacaatgggggaaaccctgatgcagcgacgccgcgtgagtgaagaagtatttcggtatgtaaagctctatcagcagggaagaaaatgacggtacctgactaagaagccccggctaactacgtgccagcagccgcggtaatacgtagggggcaagcgttatccggatttactgggtgtaaagggagcgtagacggcatggcaagccagatgtgaaaacccagggctcaaccttgggattgcatttggaactgcccaggctggagtgcaggagaggtaagcggaattcctagtgtagcggtgaaatgcgtagatattaggaggaacaccagtggcgaaggcggcttactggactgtaactgacgttgaggctcgaaagcgtggggagcaaacaggattagataccctggtagtccacgcggtaaacgatgattgctaggtgtaggtggggtatggacccatcggtgccgcagctaacgcaataagcaatccacctggggagtacgttcgcaagaatgaaactcaaaggaattgacggggacccgcacaagcggtggagcatgtggtttaattcgaagcaacgcgaagaaccttaccaagtcttgacatcccaatgacgcacctgtaaagaggtgttcccttcggggcaatggagacaggtggtgcatggttgtcgtcagctcgtgtcgtgagatgttgggttaagtcccgcaacgagcgcaacccttattcttagtagccagcaggtagagctgggcactctaaggagactgccggggataacccggaggaaggcggggatgacgtcaaatcatcatgccccttatgatttgggctacacacgtgctacaatggcgtaaacaaagggaagcgagacagtgatgtggagcaaatcccagaaataacgtctcagttcggattgtagtctgcaactcgactacatgaagctggaatcgctagtaatcgcgaatcagcatgtcgcggtgaatacgttcccgggtcttgtacacaccgcccgtcacaccatgggagtnggaaatgcccgaagtctgtgacctaaccgaaangga

SEQ ID NO: 237 - DNA, 1399 bp, Unknown
  Description of Unknown: Dielma fastidiosa sequence
  modified_base (8)..(10): a, c, t, g, unknown or other
tgcagtcnnngaagtgaagatagcttgctattggaacttagtggcgaacgggtgagtaacacgtagataacctgcctgtatgaccgggataacagttggaaacgactgctaataccggataggcagagaggaggcatctcttctctgttaaagttgggacacaacgcaaacagatggatctgcggtgcattagctagttggtgaggtaacggcccaccaaggcgatgatgcatagccggcctgagagggcgaacggccacattgggactgagacacggcccaaactcctacgggaggcagcagtagggaattttcggcaatgggggaaaccctgaccgagcaatgccgcgtgagtgaagacggccttcgggttgtaaagctctgttgtaagggaagaacggcatagagagggaatgctctatgagtgacggtaccttaccagaaagccacggctaactacgtgccagcagccgcggtaatacgtaggtggcaagcgttatccggaattattgggcgtaaagggtgcgtaggcggcgagataagtctgaggtaaaagcccgtggctcaaccacggtaagccttggaaactgtctggctggagtgcaggagaggacaatggaattccatgtgtagcggtaaaatgcgtagatatatggaggaacaccagtggcgaaggcggttgtctggcctgtaactgacgctgaagcacgaaagcgtggggagcaaataggattagataccctagtagtccacgccgtaaacgatgagaactaagtgttggggaaactcagtgctgcagttaacgcaataagttctccgcctggggagtatgcacgcaagtgtgaaactcaaaggaattgacggggggcccgcacaagcggtggagtatgtggtttaattcgacgcaacgcgaagaaccttaccaggccttgacatggtatcaaaggccctagagatagggagatagttatggtacacacaggtggtgcatggttgtcgtcagctcgtgtcgtgagatgttgggttaagtcccgcaacgagcgcaacccttgtttctagttaccaacagtaagatggggactctagagagactgccggtgacaaaccggaggaaggtggggatgacgtcaaatcatcatgccccttatggcctgggctacacacgtactacaatggcgtctacaaagagcagcgagcaggtgactgtaagcgaatctcataaaggacgtctcagttcggattgaagtctgcaactcgacttcatgaagtcggaatcgctagtaatcgcggatcagcatgccgcggtgaatacgttctcgggccttgtacacaccgcccgtcaaaccatgggagttgataatacccgaagccggtggcctaaccatttatggagggagcc

SEQ ID NO: 238 - DNA, 1395 bp, Alistipes sp.
  modified_base (2)..(3): a, c, t, g, unknown or other
  modified_base (5)..(5): a, c, t, g, unknown or other
anncntgcagtcgaggggcagcatgaagtagcaatactttgatggcgaccggcggacgggtgcgtaacgcgtatgcaacctaccttaaacagggggataacactgagaaattggtactaataccccatattattcgagacggcatcgtcttgggttgaaaactccggtggtttaagatgggcatgcgttgtattagctggttggtgaggtaacggctcaccaaggcgacgatacatagggggactgagaggtcaaccccccacattggtactgagacacggaccaaactcctacgggaggcagcagtgaggaatattggtcaatggacgcaagtctgaaccagccatgccgcgtgcaggaagacggctctatgagttgtaaactgcttttgtacgagggtaacagcatctacgcgtaggtgcatgaaagtatcgtacgaataaggatcggctaactccgtgccagcagccgcggtaatacggaggatccaagcgttatccggatttattgggtttaaagggtgcgtaggcggttttataagttagaggttaaatatcggagcttaactccgttatgcctctaatactgtaggactagagaatagttgcggtaggcggaatgtatggtgtagcggtgaaatgcttagagatcatacagaacaccgattgcgaaggcagcttaccaaactatgactgacgttgaggcacgaaagcgtggggagcaaacaggattagataccctggtagtccacgcagtaaacgatgataactcgttgtcggcgatacacagtcggtgactaagcgaaagcgataagttatccacctggggagtacgttcgcaagaatgaaactcaaaggaattgacgggggcccgcacaagcggaggaacatgtggtttaattcgatgatacgcgaggaaccttacccgggcttgaaagttatcgacggacctagaaataggtcttccctacggggcgagaaactaggtgctgcatggttgtcgtcagctcgtgccgtgaggtgtcgggttaagtcccataacgagcgcaacccctaccgttagttgccatcaggtcaagctgggcactctggcgggactgccggtgtaagccgagaggaaggtggggatgacgtcaaatcagcacggcccttacgtccggggccacacacgtgttacaatggtaggtacagagggcagctaccctgcgaagggatgcgaatctcgaaagcctatctcagttcggattggaggctgaaacccgcctccatgaagttggattcgctagtaatcgcgcatcagccatggcgcggtgaatacgttcccgggccttgtacacaccgcccgtcaagccatggaagctgggggtgcctgaagttcgtgaccgcaaggagcgac

SEQ ID NO: 239 - DNA, 1405 bp, Lactonifactor longoviformis
  modified_base (3)..(3): a, c, t, g, unknown or other
  modified_base (5)..(5): a, c, t, g, unknown or other
  modified_base (15)..(15): a, c, t, g, unknown or other
  modified_base (1396)..(1396): a, c, t, g, unknown or other
  modified_base (1401)..(1401): a, c, t, g, unknown or other
acncntgcagtcgancgaagcataaggaacggattatttcggtaagaagtactttatgactgagtggcggacgggtgagtaacgcgtggataacctgcctcatacagggggataacagttagaaatgactgctaataccgcataagcgcacagtgctgcatggcacagtgcgaaaagctccggcggtatgagatggatccgcgtttgattagctagttggtggggtaaaggcctaccaaggcgacgatcaatagccgacctgagagggtgaccggccacattgggactgagacacggcccaaactcctacgggaggcagcagtggggaatattgcacaatgggggaaaccctgatgcagcgacgccgcgtgaaggaagaagtatttcggtatgtaaacttctatcagcagggaagaaaatgacggtacctgactaagaagccccggctaattacgtgccagcagccgcggtaatacgtaaggggcaagcgttatccggatttactgggtgtaaagggagcgtagacggcagtgcaagtctgatgtgaaagcccggggctcaaccccgggactgcattggaaactgtgcagctagagtgtcggagaggtaagtggaattcctagtgtagcggtgaaatgcgtagatattaggaggaacaccagtggcgaaggcggcttactggacgataactgacgttgaggctcgaaagcgtggggagcaaacaggattagataccctggtagtccacgccgtaaacgatgaatactaggtgtcgggcgccaaaggcgttcggtgccgcagcaaacgcaataagtattccacctggggagtacgttcgcaagaatgaaactcaaaggaattgacggggacccgcacaagcggtggagcatgtggtttaattcgaagcaacgcgaagaaccttaccaagtcttgacatctgcctgaccggtccgtaacaggacccttccttcgggacaggcaagacaggtggtgcatggttgtcgtcagctcgtgtcgtgagatgttgggttaagtcccgcaacgagcgcaacccttatccttagtagccagcaggtagagctgggcactctagggagactgccagggacaacctggaggaaggtggggatgacgtcaaatcatcatgccccttatgatttgggctacacacgtgctacaatggcgtaaacaaagggaggcgaaggggtgacctggagcaaatcccaaaaataacgtctcagttcggattgtagtctgcaactcgactacatgaagctggaatcgctagtaatcgcgaatcagaatgtcgcggtgaatacgttcccgggtcttgtacacaccgcccgtcacaccatgggagtcggatatgcccgaagccggtgaccgaacccgaaanggaangagc

SEQ ID NO: 240 - DNA, 1396 bp, Clostridium citroniae
  modified_base (9)..(10): a, c, t, g, unknown or other
tgcagtcgnncgaagcaatcagaatgaagttttcggatggatttctgattgactgagtggcggacgggtgagtaacgcgtggataacctgcctcacactgggggataacagttagaaatggctgctaataccgcataagcgcacagtaccgcatggtacggtgtgaaaaactccggtggtgtgagatggatccgcgtctgattagttagttggcggggtaacggcccaccaagacagcgatcagtagccgacctgagagggtgaccggccacattgggactgagacacggcccaaactcctacgggaggcagcagtggggaatattgcacaatgggcgaaagcctgatgcagcgacgccgcgtgagtgaagaagtatttcggtatgtaaagctctatcagcagggaagaaactgacggtacctgactaagaagccccggctaactacgtgccagcagccgcggtaatacgtagggggcaagcgttatccggatttactgggtgtaaagggagcgtagacggcgaagcaagtctggagtgaaaacccagggctcaaccctgggactgctttggaaactgttttgctagagtgtcggagaggtaagtggaattcctagtgtagcggtgaaatgcgtagatattaggaggaacaccagtggcgaaggcggcttactggacgataactgacgttgaggctcgaaagcgtggggagcaaacaggattagataccctggtagtccacgccgtaaacgatgaatgctaggtgttggggggcaaagcccttcggtgccgtcgcaaacgcaataagcattccacctggggagtacgttcgcaagaatgaaactcaaaggaattgacggggacccgcacaagcggtggagcatgtggtttaattcgaagcaacgcgaagaaccttaccaagtcttgacatccccctgaccggtcagtaaagtgacctttccttcgggacaggggagacaggtggtgcatggttgtcgtcagctcgtgtcgtgagatgttgggttaagtcccgcaacgagcgcaacccttatccttagtagccagcaggtaaagctgggcactctagggagactgccagggataacctggaggaaggtggggatgacgtcaaatcatcatgccccttatgatttgggctacacacgtgctacaatggcgtaaacaaagggaagcgaccctgcgaaggcaagcaaatcccaaaaataacgtcccagttcggactgtagtctgcaacccgactacacgaagctggaatcgctagtaatcgcgaatcagaatgtcgcggtgaatacgttcccgggtcttgtacacaccgcccgtcacaccatgggagtcagcaacgcccgaagtcagtgacccaaccgaaaggagggagc

SEQ ID NO: 241 - DNA, 1364 bp, Collinsella aerofaciens
tgcagtcgaacggcacctgccctcgggcagaagcgagtggcgaacggctgagtaacacgtggagaacctgccccctcccccgggatagccgcccgaaaggacgggtaataccggataccccggggtgccgcatggcaccccggctaaagccccgacgggaggggatggctccgcggcccatcaggtagacggcggggtgacggcccaccgtgccgacaacgggtagccgggttgagagaccgaccggccagattgggactgagacacggcccagactcctacgggaggcagcagtggggaatcttgcgcaatggggggaaccctgacgcagcgacgccgcgtgcgggacggaggccttcgggtcgtaaaccgctttcagcagggaagagtcaagactgtacctgcagaagaagccccggctaactacgtgccagcagccgcggtaatacgtagggggcgagcgttatccggattcattgggcgtaaagcgcgcgtaggcggcccggcaggccgggggtcgaagcggggggctcaaccccccgaagcccccggaacctccgcggcttgggtccggtaggggagggtggaacacccggtgtagcggtggaatgcgcagatatcgggtggaacaccggtggcgaaggcggccctctgggccgagaccgacgctgaggcgcgaaagctgggggagcgaacaggattagataccctggtagtcccagccgtaaacgatggacgctaggtgtggggggacgatccccccgtgccgcagccaacgcattaagcgtcccgcctggggagtacggccgcaaggctaaaactcaaaggaattgacgggggcccgcacaagcagcggagcatgtggcttaattcgaagcaacgcgaagaaccttaccagggcttgacatatgggtgaagcgggggagaccccgtggccgagaggagcccatacaggtggtgcatggctgtcgtcagctcgtgtcgtgagatgttgggttaagtcccgcaacgagcgcaacccccgccgcgtgttgccatcgggtgatgccgggaacccacgcgggaccgccgccgtcaaggcggaggagggcggggacgacgtcaagtcatcatgccccttatgccctgggctgcacacgtgctacaatggccggtacagagggatgccaccccgcgagggggagcggatcccggaaagccggccccagttcggattgggggctgcaacccgcccccatgaagtcggagttgctagtaatcgcggatcagcatgccgcggtgaatgcgttcccgggccttgtacacaccgcccgtcacaccacccgagtcgtctgcacccgaagtcgccggcccaaccgagaggg

SEQ ID NO: 242 - DNA, 1154 bp, Clostridium aldenense
  modified_base (1)..(3): a, c, t, g, unknown or other
  modified_base (5)..(5): a, c, t, g, unknown or other
  modified_base (9)..(10): a, c, t, g, unknown or other
  modified_base (12)..(12): a, c, t, g, unknown or other
  modified_base (16)..(16): a, c, t, g, unknown or other
  modified_base (18)..(19): a, c, t, g, unknown or other
  modified_base (21)..(30): a, c, t, g, unknown or other
  modified_base (33)..(33): a, c, t, g, unknown or other
  modified_base (35)..(35): a, c, t, g, unknown or other
  modified_base (39)..(41): a, c, t, g, unknown or other
  modified_base (43)..(45): a, c, t, g, unknown or other
  modified_base (49)..(49): a, c, t, g, unknown or other
  modified_base (52)..(53): a, c, t, g, unknown or other
  modified_base (56)..(57): a, c, t, g, unknown or other
  modified_base (61)..(62): a, c, t, g, unknown or other
  modified_base (64)..(65): a, c, t, g, unknown or other
  modified_base (68)..(68): a, c, t, g, unknown or other
  modified_base (70)..(71): a, c, t, g, unknown or other
  modified_base (75)..(78): a, c, t, g, unknown or other
  modified_base (82)..(82): a, c, t, g, unknown or other
  modified_base (84)..(84): a, c, t, g, unknown or other
  modified_base (86)..(86): a, c, t, g, unknown or other
  modified_base (92)..(92): a, c, t, g, unknown or other
  modified_base (94)..(96): a, c, t, g, unknown or other
  modified_base (101)..(101): a, c, t, g, unknown or other
  modified_base (106)..(107): a, c, t, g, unknown or other
  modified_base (125)..(125): a, c, t, g, unknown or other
  modified_base (181)..(181): a, c, t, g, unknown or other
  modified_base (190)..(190): a, c, t, g, unknown or other
  modified_base (334)..(334): a, c, t, g, unknown or other
  modified_base (697)..(698): a, c, t, g, unknown or other
  modified_base (710)..(710): a, c, t, g, unknown or other
  modified_base (714)..(714): a, c, t, g, unknown or other
  modified_base (1134)..(1134): a, c, t, g, unknown or other
  modified_base (1145)..(1154): a, c, t, g, unknown or other
nnncntgannangggntnncnnnnnnnnnnggnantgannncnnngccnaannctnngggnngnngcngnngggnnnntgcncnangggcgnannngatgnagcgnngccgcgtgagtgaagaantatctcggtatgtaaagctctatcagcagggaagaaaaatgacggtacctgactangaagccccnggctaactacgtgccagcagccgcggtaatacgtagggggcaagcgttatccggatttactgggtgtaaagggagcgtagacggcgacgcaagtctggagtgaaagcccggggcccaaccccgggactgctttggaaactgtgntgctggagtgcaggagaggtaagtggaattcctagtgtagcggtgaaatgcgtagatattaggaggaacaccagtggcgaaggcggcttactggactgtaactgacgttgaggctcgaaagcgtggggagcaaacaggattagataccctggtagtccacgccgtaaacgatgaatgctaggtgtcggggggcaaagcccttcggtgccgccgctaacgcaataagcattccacctggggagtacgttcgcaagaatgaaactcaaaggaattgacggggacccgcacaagcggtggagcatgtggtttaattcgaagcaacgcgaagaaccttaccaagtcttgacatccccttgaccggcnngtaacggtgccntccnttcggggcaagggagacaggtggtgcatggttgtcgtcagctcgtgtcgtgagatgttgggttaagtcccgcaacgagcgcaacccttatccttagtagccagcacgtcgtggtgggcactctagggagactgccagggataacctggaggaaggtggggatgacgtcaaatcatcatgccccttatgatttgggctacacacgtgctacaatggcgtaaacaaagggaggcgaccctgcgaaggcaagcaaatcccaaaaataacgtcccagttcggactgtagtctgcaacccgactacacgaagctggaatcgctagtaatcgcggatcagaatgccgcggtgaatacgttcccgggtcttgtacacaccgcccgtcacaccatgggagtcagcaacgcccgaagtcagtgacccancctaacaggannnnnnnnnn

SEQ ID NO: 243 - DNA, 1363 bp, Eubacterium siraeum
  modified_base (10)..(10): a, c, t, g, unknown or other
  modified_base (37)..(37): a, c, t, g, unknown or other
  modified_base (1359)..(1359): a, c, t, g, unknown or other
tgcagtcgancggtgaagaggagcttgctcctcggancagtggcggacgggtgagtaacacgtgagcaacctggctctaagagggggacaacagttggaaacgactgctaataccgcataacgtatcgggatggcatcttcctgataccaaagattttatcgcttagagatgggctcgcgtctgattagatagttggcggggtaacggcccaccaagtcgacgatcagtagccggactgagaggttgaacggccacattgggactgagacacggcccagactcctacgggaggcagcagtgggggatattggacaatgggggcaaccctgatccagcgacgccgcgtgagggaagaaggttttcggattgtaaacctctgttgacggagaaaaaaatgatggtatccgtttagaaagccacggctaactacgtgccagcagccgcggtaatacgtaggtggcaagcgttgtccggaattactgggtgtaaagggagtgtaggcgggatatcaagtcagaagtgaaaattacgggctcaactcgtaacctgcttttgaaactgacattcttgagtgaagtagaggcaagcggaattcctagtgtagcggtgaaatgcgtagatattaggaggaacaccagtggcgaaggcggcttgctgggcttttactgacgctgaggctcgaaagcgtggggagcaaacaggattagataccctggtagtccacgccgtaaacgatgattactaggtgtggggggattgaccccttccgtgccggagtaaacacaataagtaatccacctggggagtacgaccgcaaggttgaaactcaaaggaattgacgggggcccgcacaagcagtggagtatgtggtttaattcgacgcaacgcgaagaaccttaccaggtcttgacatcgagtgaccgcctaagagattaggctttcccttcggggacacaaagacaggtggtgcatggttgtcgtcagctcgtgtcgtgagatgttgggttaagtcccgcaacgagcgcaacccttatcattagttgctacgcaagagcactctaatgagactgccgttgacaaaacggaggaaggtggggatgacgtcaaatcatcatgccctttatgacctgggctacacacgtactacaatggcgtttaacaaagagaagcaaagccgcgaggcagagcaaatctccaaaaaacgtctcagttcggattgtaggctgcaactcgcctacatgaagtcggaattgctagtaatcgtaggtcagcatactacggtgaatacgttcccgggccttgtacacaccgcccgtcaaaccatgagagttggcaacacccgaagtcggtagtctaancgca

SEQ ID NO: 244 - DNA, 1371 bp, Faecalibacterium prausnitzii
  modified_base (1369)..(1369): a, c, t, g, unknown or other
tcgaacgagcgagagagagcttgctttctcgagcgagtggcgaacgggtgagtaacgcgtgaggaacctgcctcaaagagggggacaacagttggaaacgactgctaataccgcataagcccacggcccggcatcgggcagagggaaaaggagcaatccgctttgagatggcctcgcgtccgattagctagttggtgaggtaacggcccaccaaggcgacgatcggtagccggactgagaggttgaacggccacattgggactgagacacggcccagactcctacgggaggcagcagtggggaatattgcacaatgggggaaaccctgatgcagcgacgccgcgtggaggaagaaggtcttcggattgtaaactcctgttgttgaggaagataatgacggtactcaacaaggaagtgacggctaactacgtgccagcagccgcggtaaaacgtaggtcacaagcgttgtccggaattactgggtgtaaagggagcgcaggcgggaagacaagttggaagtgaaatccatgggctcaacccatgaactgctttcaaaactgtttttcttgagtagtgcagaggtaggcggaattcccggtgtagcggtggaatgcgtagatatcgggaggaacaccagtggcgaaggcggcctactgggcaccaactgacgctgaggctcgaaagtgtgggtagcaaacaggattagataccctggtagtccacactgtaaacgatgattactaggtgttggaggattgaccccttcagtgccgcagttaacacaataagtaatccacctggggagtacgaccgcaaggttgaaactcaaaggaattgacgggggcccgcacaagcagtggagtatgtggtttaattcgacgcaacgcgaagaaccttaccaagtcttgacatcctgcgacggtgctggaaacagtactttccttcgggacgcagagacaggtggtgcatggttgtcgtcagctcgtgtcgtgagatgttgggttaagtcccgcaacgagcgcaacccttatggtcagttactacgcaagaggactctggccagactgccgttgacaaaacggaggaaggtggggatgacgtcaaatcatcatgccctttatgacttgggctacacacgtactacaatggcgttaaacaaagagaagcaagaccgcgaggtggagcaaaactcagaaacaacgtcccagttcggactgcaggctgcaactcgcctgcacgaagtcggaattgctagtaatcgcagatcagcatgctgcggtgaatacgttcccgggccttgtacacaccgcccgtcacaccatgagagccggggggacccgaagtcggtagtctaaccgcaaggaggacncc

SEQ ID NO: 245 - DNA, 1410 bp, Acidaminococcus intestini
agtcgaacggagaacttatttcggtaagttcttagtggcgaacgggtgagtaacgcgtgggcaacctgccctccagttggggacaacattccgaaagggatgctaataccgaatgtcctccctcctccgcatggaggagggaggaaagatggcctctgcttgcaagctatcgctggaagatgggcccgcgtctgattagctagttggtggggtaacggctcaccaaggcgatgatcagtagccggtctgagaggatgaacggccacattgggactgagacacggcccaaactcctacgggaggcagcagtggggaatcttccgcaatggacgaaagtctgacggagcaacgccgcgtgagtgatgaaggtcttcggattgtaaaactctgttgttagggacgaaagcaccgtgttcgaacaggtcatggtgttgacggtacctaacgaggaagccacggctaactacgtgccagcagccgcggtaatacgtaggtggcaagcgttgtccggaattattgggcgtaaagagcatgtaggcgggcttttaagtctgacgtgaaaatgcggggcttaaccccgtatggcgttggatactggaagtcttgagtgcaggagaggaaaggggaattcccagtgtagcggtgaaatgcgtagatattgggaggaacaccagtggcgaaggcgcctttctggactgtgtctgacgctgagatgcgaaagccagggtagcaaacgggattagataccccggtagtcctggccgtaaacgatggatactaggtgtaggaggtatcgaccccttctgtgccggagttaacgcaataagtatcccgcctggggactacgatcgcaagattgaaactcaaaggaattgacgggggcccgcacaagcggtggagtatgtggtttaattcgacgcaacgcgaagaaccttaccaaggcttgacattgagtgaaagacctagagataggtccctcccttcggggacacgaaaacaggtggtgcatggctgtcgtcagctcgtgtcgtgagatgttgggttaagtcccgcaacgagcgcaacccctatcctatgttaccagcgcgtaaaggcggggactcataggagactgccagggataacttggaggaaggcggggatgacgtcaagtcatcatgccccttatgtcttgggctacacacgtactacaatggtcggcaacaaagggcagcgaaaccgcgaggtggagcaaatcccagaaacccgaccccagttcggatcgtaggctgcaacccgcctacgtgaagttggaatcgctagtaatcgcaggtcagcatactgcggtgaatacgttcccgggccttgtacacaccgcccgtcacaccacgaaagttggtaacacccgaagccggtgagataaccttttag

SEQ ID NO: 246 - DNA, 1125 bp, Bifidobacterium longum
  modified_base (1)..(2): a, c, t, g, unknown or other
  modified_base (5)..(7): a, c, t, g, unknown or other
  modified_base (12)..(13): a, c, t, g, unknown or other
  modified_base (20)..(20): a, c, t, g, unknown or other
  modified_base (24)..(24): a, c, t, g, unknown or other
  modified_base (27)..(31): a, c, t, g, unknown or other
  modified_base (34)..(34): a, c, t, g, unknown or other
  modified_base (36)..(42): a, c, t, g, unknown or other
  modified_base (45)..(49): a, c, t, g, unknown or other
  modified_base (54)..(55): a, c, t, g, unknown or other
  modified_base (57)..(57): a, c, t, g, unknown or other
  modified_base (59)..(59): a, c, t, g, unknown or other
  modified_base (71)..(72): a, c, t, g, unknown or other
  modified_base (79)..(79): a, c, t, g, unknown or other
  modified_base (85)..(86): a, c, t, g, unknown or other
  modified_base (89)..(89): a, c, t, g, unknown or other
  modified_base (99)..(99): a, c, t, g, unknown or other
  modified_base (105)..(105): a, c, t, g, unknown or other
  modified_base (1115)..(1120): a, c, t, g, unknown or other
  modified_base (1122)..(1125): a, c, t, g, unknown or other
nntgnnnatacnncccagantctncgnnnnngcngnnnnnnntgnnnnngggcnnancngatgcagcgacnncgcgtgngggatnnagnccttcgggtntaaacntcttttatcgggggagcaagcgagagtgagtttacccgttgaataagcaccggctaactacgtgccagcagccgcggtaatacgtagggtgcaagcgttatccggaattattgggcgtaaagggctcgtaggcggttcgtcgcgtccggtgtgaaagtccatcgcttaacggtggatccgcgccgggtacgggcgggcttgagtgcggtaggggagactggaattcccggtgtaacggtggaatgtgtagatatcgggaagaacaccaatggcgaaggcaggtctctgggccgttactgacgctgaggagcgaaagcgtggggagcgaacaggattagataccctggtagtccacgccgtaaacggtggatgctggatgtggggcccgttccacgggttccgtgtcggagctaacgcgttaagcatcccgcctggggagtacggccgcaaggctaaaactcaaagaaattgacgggggcccgcacaagcggcggagcatgcggattaattcgatgcaacgcgaagaaccttacctgggcttgacatgttcccgacggtcgtagagatacggcttcccttcggggcgggttcacaggtggtgcatggtcgtcgtcagctcgtgtcgtgagatgttgggttaagtcccgcaacgagcgcaaccctcgccccgtgttgccagcggattatgccgggaactcacgggggaccgccggggttaactcggaggaaggtggggatgacgtcagatcatcatgccccttacgtccagggcttcacgcatgctacaatggccggtacaacgggatgcgacgcggcgacgcggagcggatccctgaaaaccggtctcagttcggatcgcagtctgcaactcgactgcgtgaaggcggagtcgctagtaatcgcgaatcagcaacgtcgcggtgaatgcgttcccgggccttgtacacaccgcccgtcaagtcatgaaagtgggcagcacccgaagccggtggcctaaccccttgtgggannnnnncnnnn

SEQ ID NO: 247 - DNA, 1415 bp, Phascolarctobacterium faecium
  modified_base (5)..(5): a, c, t, g, unknown or other
gtcgncggagaattttatttcggtagaattcttagtggcgaacgggtgagtaacgcgtaggcaacctgccctttagacggggacaacattccgaaaggagtgctaataccggatgtgatcatcgtgccgcatggcaggatgaagaaagatggcctctacaagtaagctatcgctaaaggatgggcctgcgtctgattagctagttggtagtgtaacggactaccaaggcgatgatcagtagccggtctgagaggatgaacggccacattgggactgagacacggcccaaactcctacgggaggcagcagtggggaatcttccgcaatggacgaaagtctgacggagcaacgccgcgtgagtgatgaaggatttcggtctgtaaagctctgttgtttatgacgaacgtgcagtgtgtgaacaatgcattgcaatgacggtagtaaacgaggaagccacggctaactacgtgccagcagccgcggtaatacgtaggtggcgagcgttgtccggaattattgggcgtaaagagcatgtaggcggcttaataagtcgagcgtgaaaatgcggggctcaaccccgtatggcgctggaaactgttaggcttgagtgcaggagaggaaaggggaattcccagtgtagcggtgaaatgcgtagatattgggaggaacaccagtggcgaaggcgcctttctggactgtgtctgacgctgagatgcgaaagccagggtagcgaacgggattagataccccggtagtcctggccgtaaacgatgggtactaggtgtaggaggtatcgaccccttctgtgccggagttaacgcaataagtaccccgcctggggagtacggccgcaaggttgaaactcaaaggaattgacgggggcccgcacaagcggtggagtatgtggtttaattcgacgcaacgcgaagaaccttaccaaggcttgacattgattgaacgctctagagatagagatttcccttcggggacaagaaaacaggtggtgcatggctgtcgtcagctcgtgtcgtgagatgttgggttaagtcccgcaacgagcgcaacccctatcctatgttaccagcaagtaaagttggggactcatgggagactgccagggacaacctggaggaaggcggggatgacgtcaagtcatcatgccccttatgtcttgggctacacacgtactacaatggtcggaaacagagggaagcgaagccgcgaggcagagcaaaccccagaaacccgatctcagttcggatcgcaggctgcaacccgcctgcgtgaagtcggaatcgctagtaatcgcaggtcagcatactgcggtgaatacgttcccgggccttgtacacaccgcccgtcacaccacgaaagttggtaacacccgaagccggtgaggtaacctataaggagcc

SEQ ID NO: 248 - DNA, 1377 bp, Unknown
  Description of Unknown: Neglecta timonensis sequence
  modified_base (3)..(3): a, c, t, g, unknown or other
  modified_base (24)..(24): a, c, t, g, unknown or other
  modified_base (33)..(33): a, c, t, g, unknown or other
tcnagcgagaagccattgactganacttcggtnagaaggatatggtggaaagcggcggacgggtgagtaacgcgtaggcaacctgccccttacagagggatagccattggaaacgatgattaaaacctcataacgcatcccccccacatggaggggaagccaaagattcatcggtaagggatgggcctgcgtctgattagcttgttggcggggtaacggcccaccaaggcgacgatcagtagccgacctgagagggtgatcggccacattggaactgagacacggtccaaactcctacgggaggcagcagtggggaatattgcacaatgggcgaaagcctgatgcagcaacgccgcgtgagggatgaaggccttcgggtcgtaaacctctgtccttggggaagaaacaaatgacggtacccatggaggaagccccggctaactacgtgccagcagccgcggtaatacgtagggggcgagcgttatccggaattattgggcgtaaagagtgcgtaggtggttacctaagcgcagggtctaaggcaatggctcaaccattgttcgccctgcgaactgggctacttgagtgcaggagaggaaagcggaattcctagtgtagcggtgaaatgcgtagatattaggaggaacaccagtggcgaaggcggctttctggactgttactgacactgaggcacgaaagcgtggggagcaaacaggattagataccctggtagtccacgccgtaaacgatgagcactaggtgtcggggccgcaaggcttcggtgccgcagttaacgcattaagtgctccgcctggggagtacgcacgcaagtgtgaaactcaaaggaattgacggggacccgcacaagcagcggagcatgtggtttaattcgaagcaacgcgaagaaccttaccaggacttgacatcccactgacagatccctaaccggatccttcttcggacagtggagacaggtggtgcatggttgtcgtcagctcgtgtcgtgagatgttgggttaagtcccgcaacgagcgcaacccttgccattagttgccatcattcagttgggcactctaatgggactgccggggacaactcggaggaaggtggggatgacgtcaaatcatcatgccccttatgttctgggctacacacgtgctacaatggccggtacagcaagaagcaaaaccgcgaggtggagcaaatctcaaaaaccggtcccagttcggactgcaggctgaaacccgcctgcacgaagccggagttgctagtaatcgtggatcagaatgccacggtgaatgcgttcccgggtcttgtacacaccgcccgtcacaccatggaagttgggggtgcccgaagccggcagggaaatatgc

SEQ ID NO: 249 - DNA, 1401 bp, Citrobacter portucalensis
  modified_base (8)..(9): a, c, t, g, unknown or other
  modified_base (1400)..(1400): a, c, t, g, unknown or other
gcagtcgnncggtagcacagaggagcttgctccttgggtgacgagtggcggacgggtgagtaatgtctgggaaactgcccgatggagggggataactactggaaacggtagctaataccgcataacgtcgcaagaccaaagagggggaccttcgggcctcttgccatcggatgtgcccagatgggattagctagtaggtggggtaacggctcacctaggcgacgatccctagctggtctgagaggatgaccagccacactggaactgagacacggtccagactcctacgggaggcagcagtggggaatattgcacaatgggcgcaagcctgatgcagccatgccgcgtgtatgaagaaggccttcgggttgtaaagtactttcagcgaggaggaaggcgttgtggttaataaccgcagcgattgacgttactcgcagaagaagcaccggctaactccgtgccagcagccgcggtaatacggagggtgcaagcgttaatcggaattactgggcgtaaagcgcacgcaggcggtctgtcaagtcggatgtgaaatccccgggctcaacctgggaactgcatccgaaactggcaggctagagtcttgtagaggggggtagaattccaggtgtagcggtgaaatgcgtagagatctggaggaataccggtggcgaaggcggccccctggacaaagactgacgctcaggtgcgaaagcgtggggagcaaacaggattagataccctggtagtccacgccgtaaacgatgtcgacttggaggttgtgcccttgaggcgtggcttccggagctaacgcgttaagtcgaccgcctggggagtacggccgcaaggttaaaactcaaatgaattgacgggggcccgcacaagcggtggagcatgtggtttaattcgatgcaacgcgaagaaccttacctactcttgacatccagagaacttagcagagatgctttggtgccttcgggaactctgagacaggtgctgcatggctgtcgtcagctcgtgttgtgaaatgttgggttaagtcccgcaacgagcgcaacccttatcctttgttgccagcggttaggccgggaactcaaaggagactgccagtgataaactggaggaaggtggggatgacgtcaagtcatcatggcccttacgagtagggctacacacgtgctacaatggcatatacaaagagaagcgacctcgcgagagcaagcggacctcataaagtatgtcgtagtccggattggagtctgcaactcgactccatgaagtcggaatcgctagtaatcgtggatcagaatgccacggtgaatacgttcccgggccttgtacacaccgcccgtcacaccatgggagtgggttgcaaaagaagtaggtagcttaaccttcgggang

SEQ ID NO: 250 - DNA, 1182 bp, Bifidobacterium adolescentis
  modified_base (1)..(10): a, c, t, g, unknown or other
  modified_base (661)..(661): a, c, t, g, unknown or other
  modified_base (823)..(823): a, c, t, g, unknown or other
  modified_base (829)..(831): a, c, t, g, unknown or other
  modified_base (893)..(893): a, c, t, g, unknown or other
  modified_base (912)..(913): a, c, t, g, unknown or other
  modified_base (918)..(918): a, c, t, g, unknown or other
  modified_base (921)..(922): a, c, t, g, unknown or other
  modified_base (931)..(931): a, c, t, g, unknown or other
  modified_base (937)..(937): a, c, t, g, unknown or other
  modified_base (944)..(945): a, c, t, g, unknown or other
  modified_base (949)..(949): a, c, t, g, unknown or other
  modified_base (952)..(952): a, c, t, g, unknown or other
  modified_base (958)..(958): a, c, t, g, unknown or other
  modified_base (971)..(971): a, c, t, g, unknown or other
  modified_base (973)..(975): a, c, t, g, unknown or other
  modified_base (977)..(977): a, c, t, g, unknown or other
  modified_base (979)..(984): a, c, t, g, unknown or other
  modified_base (989)..(993): a, c, t, g, unknown or other
  modified_base (995)..(996): a, c, t, g, unknown or other
  modified_base (1008)..(1008): a, c, t, g, unknown or other
  modified_base (1011)..(1015): a, c, t, g, unknown or other
  modified_base (1017)..(1017): a, c, t, g, unknown or other
  modified_base (1020)..(1023): a, c, t, g, unknown or other
  modified_base (1027)..(1027): a, c, t, g, unknown or other
  modified_base (1031)..(1031): a, c, t, g, unknown or other
  modified_base (1034)..(1035): a, c, t, g, unknown or other
  modified_base (1037)..(1040): a, c, t, g, unknown or other
  modified_base (1042)..(1042): a, c, t, g, unknown or other
  modified_base (1045)..(1045): a, c, t, g, unknown or other
  modified_base (1052)..(1052): a, c, t, g, unknown or other
  modified_base (1054)..(1064): a, c, t, g, unknown or other
  modified_base (1066)..(1070): a, c, t, g, unknown or other
  modified_base (1072)..(1078): a, c, t, g, unknown or other
  modified_base (1080)..(1084): a, c, t, g, unknown or other
  modified_base (1086)..(1094): a, c, t, g, unknown or other
  modified_base (1096)..(1098): a, c, t, g, unknown or other
  modified_base (1100)..(1107): a, c, t, g, unknown or other
  modified_base (1113)..(1113): a, c, t, g, unknown or other
  modified_base (1115)..(1119): a, c, t, g, unknown or other
  modified_base (1128)..(1133): a, c, t, g, unknown or other
  modified_base (1135)..(1139): a, c, t, g, unknown or other
  modified_base (1141)..(1147): a, c, t, g, unknown or other
  modified_base (1149)..(1157): a, c, t, g, unknown or other
  modified_base (1159)..(1170): a, c, t, g, unknown or other
  modified_base (1173)..(1178): a, c, t, g, unknown or other
  modified_base (1180)..(1180): a, c, t, g, unknown or other
  modified_base (1182)..(1182): a, c, t, g, unknown or other
nnnnnnnnnngtcgaacgggatcccaggagcttgctcctgggtgagagtggcgaacgggtgagtaatgcgtgaccgacctgccccatacaccggaatagctcctggaaacgggtggtaatgccggatgctccagttgaccgcatggtcctctgggaaagcttttgcggtatgggatggggtcgcgtcctatcagcttgatggcggggtaacggcccaccatggcttcgacgggtagccggcctgagagggcgaccggccacattgggactgagatacggcccagactcctacgggaggcagcagtggggaatattgcacaatgggcgcaagcctgatgcagcgacgccgcgtgcgggatgacggccttcgggttgtaaaccgcttttgactgggagcaagcccttcggggtgagtgtacctttcgaataagcaccggctaactacgtgccagcagccgcggtaatacgtagggtgcaagcgttatccggaattattgggcgtaaagggctcgtaggcggttcgtcgcgtccggtgtgaaagtccatcgcttaacggtggatccgcgccgggtacgggcgggcttgagtgcggtaggggagactggaattcccggtgtaacggtggaatgtgtagatatcgggaagaacaccaatggcgaangcaggtctctgggccgtcactgacgctgaggagcgaaagcgtggggagcgaacaggattagataccctggtagtccacgccgtaaacggtggatgctggatgtggggaccattccacggtctccgtgtcggagccaacgcgttaagcatcccgcctggggantacggnnncaaggctaaaactcaaagaaattgacgggggcccgcacaagcggcggagcatgcggattaantcgatgcaacgcgaagaannttacntgnnttgacatgnttcccnacagccnnaganatncggtcntcccttcggggcngnnncncnnnnnngcatnnnnncnncagctcgtgtcntgnnnnngntgnnnnagtncccncannannnnanccntcgcccngnnnnnnnnnnncnnnnngnnnnnnntnnnnngnnnnnnnnncnnntnnnnnnnngggatnannnnnaatcatcannnnnntnnnnncnnnnnnncnnnnnnnnnannnnnnnnnnnnacnnnnnngncn

SEQ ID NO: 251 - DNA, 1378 bp, Bifidobacterium pseudocatenulatum
  modified_base (5)..(6): a, c, t, g, unknown or other
gtcgnncgggatccatcaggctttgcttggtggtgagagtggcgaacgggtgagtaatgcgtgaccgacctgccccatacaccggaatagctcctggaaacgggtggtaatgccggatgctccgactcctcgcatggggtgtcgggaaagatttcatcggtatgggatggggtcgcgtcctatcaggtagtcggcggggtaacggcccaccgagcctacgacgggtagccggcctgagagggcgaccggccacattgggactgagatacggcccagactcctacgggaggcagcagtggggaatattgcacaatgggcgcaagcctgatgcagcgacgccgcgtgcgggatgacggccttcgggttgtaaaccgcttttgatcgggagcaagccttcgggtgagtgtacctttcgaataagcaccggctaactacgtgccagcagccgcggtaatacgtagggtgcaagcgttatccggaattattgggcgtaaagggctcgtaggcggttcgtcgcgtccggtgtgaaagtccatcgcttaacggtggatctgcgccgggtacgggcgggctggagtgcggtaggggagactggaattcccggtgtaacggtggaatgtgtagatatcgggaagaacaccaatggcgaaggcaggtctctgggccgttactgacgctgaggagcgaaagcgtggggagcgaacaggattagataccctggtagtccacgccgtaaacggtggatgctggatgtggggcccgttccacgggttccgtgtcggagctaacgcgttaagcatcccgcctggggagtacggccgcaaggctaaaactcaaagaaattgacgggggcccgcacaagcggcggagcatgcggattaattcgatgcaacgcgaagaaccttacctgggcttgacatgttcccgacagccgtagagatatggcctcccttcggggcgggttcacaggtggtgcatggtcgtcgtcagctcgtgtcgtgagatgttgggttaagtcccgcaacgagcgcaaccctcgccctgtgttgccagcacgtcatggtgggaactcacgggggaccgccggggtcaactcggaggaaggtggggatgacgtcagatcatcatgccccttacgtccagggcttcacgcatgctacaatggccggtacaacgggatgcgacacggcgacgtggagcggatccctgaaaaccggtctcagttcggattggagtctgcaacccgactccatgaaggcggagtcgctagtaatcgcggatcagcaacgccgcggtgaatgcgttcccgggccttgtacacaccgcccgtcaagtcatgaaagtgggtagcacccgaagccggtggcctaaccctttg

SEQ ID NO: 252 - DNA, 1388 bp, Oscillibacter sp.
  modified_base (8)..(11): a, c, t, g, unknown or other
  modified_base (1376)..(1376): a, c, t, g, unknown or other
tgcagtcnnnngagcacccttgactgaggtttcggccaaatgataggaatgcttagtggcggactggtgagtaacgcgtgaggaacctaccttccagagggggacaacagttggaaacgactgctaataccgcatgacgcatgaccggggcatcccgggcatgtcaaagattttatcgctggaagatggcctcgcgtctgattagctagatggtggggtaacggcccaccatggcgacgatcagtagccggactgagaggttgaccggccacattgggactgagatacggcccagactcctacgggaggcagcagtggggaatattgggcaatggacgcaagtctgacccagcaacgccgcgtgaaggaagaaggctttcgggttgtaaacttcttttgtcagggaagagtagaagacggtacctgacgaataagccacggctaactacgtgccagcagccgcggtaatacgtaggtggcaagcgttgtccggatttactgggtgtaaagggcgtgcagccgggccggcaagtcagatgtgaaatctggaggcttaacctccaaactgcatttgaaactgtaggtcttgagtaccggagaggttatcggaattccttgtgtagcggtgaaatgcgtagatataaggaagaacaccagtggcgaaggcggataactggacggcaactgacggtgaggcgcgaaagcgtggggagcaaacaggattagataccctggtagtccacgctgtaaacgatggatactaggtgtgcggggactgaccccctgcgtgccgcagttaacacaataagtatcccacctggggagtacgatcgcaaggttgaaactcaaaggaattgacgggggcccgcacaagcggtggattatgtggtttaattcgaagcaacgcgaagaaccttaccagggcttgacatcctactaacgaagtagagatacatcaggtgcccttcggggaaagtagagacaggtggtgcatggttgtcgtcagctcgtgtcgtgagatgttgggttaagtcccgcaacgagcgcaacccctattgttagttgctacgcaagagcactctagcgagactgccgttgacaaaacggaggaaggtggggacgacgtcaaatcatcatgccccttatgtcctgggctacacacgtaatacaatggcggtcaacagagggaggcaaagccgcgaggcagagcaaacccccaaaagccgtcccagttcggatcgcaggctgcaacccgcctgcgtgaagtcggaatcgctagtaatcgcggatcagcatgccgcggtgaatacgttcccgggccttgtacacaccgcccgtcacaccatgagagtcgggaacacccgaagtccgtagcntaaccgcaagga

SEQ ID NO: 253 - DNA, 1393 bp, Roseburia hominis
  modified_base (1388)..(1392): a, c, t, g, unknown or other
tgcagtcgacgaagcactttaattgatttcttcggaatgaagtttttgtgactgagtggcggacgggtgagtaacgcgtgggtaacctgcctcatacagggggataacagttggaaacgactgctaataccgcataagcgcacgggattgcatgatccagtgtgaaaaactccggtggtatgagatggacccgcgtctgattagccagttggcggggtaacggcccaccaaagcgacgatcagtagccgacctgagagggtgaccggccacattgggactgagacacggcccaaactcctacgggaggcagcagtggggaatattgcacaatgggggaaaccctgatgcagcgacgccgcgtgagcgaagaagtatttcggtatgtaaagctctatcagcagggaagaagaatgacggtacctgactaagaagcaccggctaaatacgtgccagcagccgcggtaatacgtatggtgcaagcgttatccggatttactgggtgtaaagggagcgcaggcggtacggcaagtctgatgtgaaatcccggggctcaaccccggtactgcattggaaactgtcggactagagtgtcggaggggtaagtggaattcctagtgtagcggtgaaatgcgtagatattaggaggaacaccagtggcgaaggcggcttactggacgattactgacgctgaggctcgaaagcgtggggagcaaacaggattagataccctggtagtccacgccgtaaacgatgaatactaggtgtcggggagcattgctcttcggtgccgcagcaaacgcaataagtattccacctggggagtacgttcgcaagaatgaaactcaaaggaattgacggggacccgcacaagcggtggagcatgtggtttaattcgaagcaacgcgaagaaccttaccaagtcttgacatcccactgaccaagtatgtaatgtactttctcttcggagcagtggtgacaggtggtgcatggttgtcgtcagctcgtgtcgtgagatgttgggttaagtcccgcaacgagcgcaacccctattcttagtagccagcggttcggccgggcactctagggagactgccagggataacctggaggaaggtggggatgacgtcaaatcatcatgccccttatgacttgggctacacacgtgctacaatggcgtaaacaaagggaagcaatcccgcgagggggagcaaatctcaaaaataacgtctcagttcggactgtagtctgcaactcgactacacgaagctggaatcgctagtaatcgcgaatcagaatgtcgcggtgaatacgttcccgggtcttgtacacaccgcccgtcacaccatgggagttggtaatgcccgaagtcagtgacccaaccgcaagnnnnng

SEQ ID NO: 254 - DNA, 1202 bp, Eubacterium hallii
  modified_base (15)..(16): a, c, t, g, unknown or other
  modified_base (18)..(20): a, c, t, g, unknown or other
  modified_base (960)..(961): a, c, t, g, unknown or other
gattcttcggatganngnnnggtgactgagtggcggacgggtgagtaacgcgtgggtaacctgccctgtacagggggataacagctggaaacggctgctaataccgcataagcgcacgaggagacatctccttgtgtgaaaaactccggtggtacaggatgggcccgcgtctgattagctggttggcagggtaacggcctaccaaggcaacgatcagtagccggtctgagaggatgaacggccacattggaactgagacacggtccaaactcctacgggaggcagcagtggggaatattgcacaatgggggaaaccctgatgcagcaacgccgcgtgagtgaagaagtatttcggtatgtaaagctctatcagcagggaagataatgacggtacctgactaagaagctccggctaaatacgtgccagcagccgcggtaatacgtatggagcaagcgttatccggatttactgggtgtaaagggtgcgtaggtggcagtgcaagtcagatgtgaaaggccggggctcaaccccggagctgcatttgaaactgctcgggctagagtacaggagaggcaggcggaattcctagtgtagcggtgaaatgcgtagatattaggaggaacaccagtggcgaaggcggcctgctggactgttactgacactgaggcacgaaagcgtggggagcaaacaggattagataccctggtagtccacgccgtaaacgatgaatactaggtgtcggggccgtataggcttcgggtgccgccgctaacgcagtaagtattccacctggggagtacgttcgcaagaatgaaactcaaaggaattgacggggacccgcacaagcggtggagcatgtggtttaattcgaagcaacgcgaaagaaccttaccaggtcttgacatccttctgaccactccgtaatggagttttccttcgggacagaagagacaggtggnntatggttgtcgtcagctcgtgtcgtgagatgttgggttaagtcccgcaacgagcgcaacccctatcttcagtagccagcaggtaaggctgggcactctggagagactgccagggataacctggaggaaggtggggacgacgtcaaatcatcatgccccttatgatctgggcgacacacgtgctacaatggcggtcacagagtgaggcgaacccgggagggggagcaaaccacaacaaggcc

SEQ ID NO: 255 - DNA, 1391 bp, Unknown
  Description of Unknown: Hungatella effluvii sequence
  modified_base (13)..(14): a, c, t, g, unknown or other
  modified_base (23)..(23): a, c, t, g, unknown or other
  modified_base (941)..(945): a, c, t, g, unknown or other
  modified_base (1389)..(1389): a, c, t, g, unknown or other
tgcagtcgagcgnngcggtttcnatgaagttttcggatggatttgaaattgacttagcggcggacgggtgagtaacgcgtgggtaacctgccttacactgggggataacagttagaaatgactgctaataccgcataagcgcacagggccgcatggtccggtgtgaaaaactccggtggtgtaagatggacccgcgtctgattaggtagttggcggggtaacggcccaccaagccgacgatcagtagccgacctgagagggtgaccggccacattgggactgagacacggcccaaactcctacgggaggcagcagtggggaatattggacaatgggcgaaagcctgatccagcgacgccgcgtgagtgaagaagtatttcggtatgtaaagctctatcagcagggaagaaaatgacggtacctgactaagaagccccggctaactacgtgccagcagccgcggtaatacgtagggggcaagcgttatccggatttactgggtgtaaagggagcgtagacggtttagcaagtctgaagtgaaagcccggggctcaaccccggtactgctttggaaactgttagacttgagtgcaggagaggtaagtggaattcctagtgtagcggtgaaatgcgtagatattaggaggaacaccagtggcgaaggcggcttactggactgtaactgacgttgaggctcgaaagcgtggggagcaaacaggattagataccctggtagtccacgccgtaaacgatgaatactaggtgtcggggggcaaagcccttcggtgccgccgcaaacgcaataagtattccacctggggagtacgttcgcaagaatgaaactcaaaggaattgacggggacccgcacaagcggtggagcatgtggtttaattcgaagcaacgcgaagaaccttaccaagtcttgacatcccattgaaannnnnttaaccggtgtccctcttcggagcaatggagacaggtggtgcatggttgtcgtcagctcgtgtcgtgagatgttgggttaagtcccgcaacgagcgcaacccttatccttagtagccagcgagtagagtcgggcactctggggagactgccagggataacctggaggaaggtggggatgacgtcaaatcatcatgccccttatgatttgggctacacacgtgctacaatggcgtaaacaaagggaagcaaaggagcgatccggagcaaaccccaaaaataacgtctcagttcggattgcaggctgcaactcgcctgcatgaagctggaatcgctagtaatcgcgaatcagaatgtcgcggtgaatacgttcccgggtcttgtacacaccgcccgtcacaccatgggagttggtaacgcccgaagtcagtgacccaaccgcaagnag

SEQ ID NO: 256 - DNA, 1325 bp, Blautia faecis
  modified_base (1321)..(1321): a, c, t, g, unknown or other
tggcggacgggtgagtaacgcgtgggtaacctgccttatactgggggataacagccagaaatgactgctaataccgcataagcgcacggggccgcatggtcctgtgtgaaaaactccggtggtataagatggacccgcgttggattagctagttggcagggcagcggcctaccaaggcgacgatccatagccggcctgagagggtgaacggccacattgggactgagacacggcccagactcctacgggaggcagcagtggggaatattgcacaatgggggaaaccctgatgcagcgacgccgcgtgaaggaagaagtatctcggtatgtaaacttctatcagcagggaagataatgacggtacctgactaagaagccccggctaactacgtgccagcagccgcggtaatacgtagggggcgagcgttatccggatttactgggtgtaaagggagcgtagacggcgtatcaagtctgatgtgaaaggcaggggcttaacccctggactgcattggaaactggtatgcttgagtgccggaggggtaagcggaattcctagtgtagcggtgaaatgcgtagatattaggaggaacaccagtggcgaaggcggcttactggacggtaactgacgttgaggctcgaaagcgtggggagcaaacaggattagataccctggtagtccacgccgtaaacgatgaatactaggtgtctgggagcacagctcttaggtgccgccgcaaacgcattaagtattccacctggggagtacgttcgcaagaatgaaactcaaaggaattgacggggacccgcacaagcggtggagcatgtggtttaattcgaagcaacgcgaagaaccttaccaaatcttgacatccctctgacagagtatgtaatgtacttttccttcgggacaggggagacaggtggtgcatggttgtcgtcagctcgtgtcgtgagatgttgggttaagtcccgcaacgagcgcaacccctatccttagtagccagcaagtaatgttgggcactctgaggagactgccagggataacctggaggaaggcggggatgacgtcaaatcatcatgccccttatgatttgggctacacacgtgctacaatggcgtaaacaaagggaagcgaacctgtgagggtgggcaaatctcaaaaataacgtcccagttcggactgcagtctgcaactcgactgcacgaagctggaatcgctagtaatcgcggatcagaatgccgcggtgaatacgttcccgggtcttgtacacaccgcccgtcacaccatgggagtcagtaacgcccgaagtcagtgacnctaa

SEQ ID NO: 257 - DNA, 1396 bp, Eubacterium eligens
tgcagtcgaacgaagcatttagaacagattacttcggtttgaagttctttatgactgagtggcggacgggtgagtaacgcgtgggtaacctgccttgtactgggggatagcagctggaaacggctggtaataccgcataagcgcacaatgttgcatgacatggtgtgaaaaactccggtggtataagatggacccgcgtctgattagctagttggtgagataacagcccaccaaggcgacgatcagtagccgacctgagagggtgaccggccacattgggactgagacacggcccagactcctacgggaggcagcagtggggaatattgcacaatggaggaaactctgatgcagcgacgccgcgtgagtgaagaagtaattcgttatgtaaagctctatcagcagggaagatagtgacggtacctgactaagaagctccggctaaatacgtgccagcagccgcggtaatacgtatggagcaagcgttatccggatttactgggtgtaaagggagtgtaggtggcccatgcaagtcagaagtgaaaatccggggctcaaccccggaactgcttttgaaactgtaaggctggagtgcaggaggggtgagtggaattcctagtgtagcggtgaaatgcgtagatattaggaggaacaccagtggcgaaggcggctcactggactgtaactgacactgaggctcgaaagcgtggggagcaaacaggattagataccctggtagtccacgccgtaaacgatgaatactaggtgtcggggcccataagggcttcggtgccgcagcaaacgcaataagtattccacctggggagtacgttcgcaagaatgaaactcaaaggaattgacggggacccgcacaagcggtggagcatgtggtttaattcgaagcaacgcgaagaaccttaccaagtcttgacatcccactgaccggacagtaatgtgtcctttccttcgggacagtggagacaggtggtgcatggttgtcgtcagctcgtgtcgtgagatgttgggttaagtcccgcaacgagcgcaacccctatccttagtagccagcagtaagatgggcactctagggagactgccagggataacctggaggaaggtggggatgacgtcaaatcatcatgccccttatgacttgggctacacacgtgctacaatggcgtaaacaaagtgaagcgaagtcgtgaggccaagcaaatcacaaaaataacgtctcagttcggattgtagtctgcaactcgactacatgaagctggaatcgctagtaatcgcagatcagaatgctgcggtgaatacgttcccgggtcttgtacacaccgcccgtcacaccatgggagtcgaaaatgcccgaagtcggtgacctaacgtaagaaggagc

SEQ ID NO: 258 - DNA, 1374 bp, Turicibacter sanguinis
tcgagcgaaccacttcggtggtgagcggcgaacgggtgagtaacacgtaggttatctgcccatcagacggggacaacgattggaaacgatcgctaataccggataggacgaaagtttaaaggtgcttcggcaccactgatggatgagcctgcggcgcattagctagttggtagggtaaaggcctaccaaggcgacgatgcgtagccgacctgagagggtgaacggccacactgggactgagacacggcccagactcctacgggaggcagcagtagggaatcttcggcaatgggcgaaagcctgaccgagcaacgccgcgtgaatgatgaaggccttcgggttgtaaaattctgttataagggaagaatggctctagtaggaaatggctagagtgtgacggtaccttatgagaaagccacggctaactacgtgccagcagccgcggtaatacgtaggtggcgagcgttatccggaattattgggcgtaaagagcgcgcaggtggttgattaagtctgatgtgaaagcccacggcttaacccgtggagggtcattggaaactggtcaacttgagtgcagaagagggaagtggaattccatgtgtagcggtgaaatgcgtagagatatggaggaacaccagtggcgaaggcggcttcctggtctgtaactgacactgaggcgcgaaagcgtggggagcaaacaggattagataccctggtagtccacgccgtaaacgatgagtgctaagtgttgggggtcgaacctcagtgctgaagttaacgcattaagcactccgcctggggagtacggtcgcaagactgaaactcaaaggaattgacggggacccgcacaagcggtggagcatgtggtttaattcgaagcaacgcgaagaaccttaccaggtcttgacataccagtgaccgtcctagagataggattttcccttcggggacaatggatacaggtggtgcatggttgtcgtcagctcgtgtcgtgagatgttgggttaagtcccgcaacgagcgcaacccctgtcgttagttgccagcattcagttggggactctaacgagactgccagtgacaaactggaggaaggtggggatgacgtcaaatcatcatgccccttatgacctgggctacacacgtgctacaatggttggtacaaagagaagcgaagcggtgacgtggagcaaacctcataaagccaatctcagttcggattgtaggctgcaactcgcctacatgaagttggaatcgctagtaatcgcgaatcagcatgtcgcggtgaatacgttcccgggtcttgtacacaccgcccgtcacaccacgagagtttacaacacccgaagtcagtggcctaaccgcaaggaggga

SEQ ID NO: 259 - DNA, 1389 bp, Dorea longicatena
  modified_base (23)..(23): a, c, t, g, unknown or other
  modified_base (1384)..(1388): a, c, t, g, unknown or other
tcgagcgaagcactttggaagantcttcggatgatttcctttgtgactgagcggcggacgggtgagtaacgcgtgggtaacctgcctcatacagggggataacagttagaaatgactgctaataccgcataagaccacggtaccgcatggtacagtggtaaaaactccggtggtatgagatggacccgcgtctgattaggtagttggtggggtaacggcctaccaagccgacgatcagtagccgacctgagagggtgaccggccacattgggactgagacacggcccagactcctacgggaggcagcagtggggaatattgcacaatggaggaaactctgatgcagcgacgccgcgtgaaggatgaagtatttcggtatgtaaacttctatcagcagggaagaaaatgacggtacctgactaagaagccccggctaactacgtgccagcagccgcggtaatacgtagggggcaagcgttatccggatttactgggtgtaaagggagcgtagacggcacggcaagccagatgtgaaagcccggggctcaaccccgggactgcatttggaactgctgagctagagtgtcggagaggcaagtggaattcctagtgtagcggtgaaatgcgtagatattaggaggaacaccagtggcgaaggcggcttgctggacgatgactgacgttgaggctcgaaagcgtggggagcaaacaggattagataccctggtagtccacgccgtaaacgatgactgctaggtgtcgggtggcaaagccattcggtgccgcagctaacgcaataagcagtccacctggggagtacgttcgcaagaatgaaactcaaaggaattgacggggacccgcacaagcggtggagcatgtggtttaattcgaagcaacgcgaagaaccttacctgatcttgacatcccgatgaccgcttcgtaatggaagcttttcttcggaacatcggtgacaggtggtgcatggttgtcgtcagctcgtgtcgtgagatgttgggttaagtcccgcaacgagcgcaacccctatcttcagtagccagcaggttaagctgggcactctggagagactgccagggataacctggaggaaggtggggatgacgtcaaatcatcatgccccttatgaccagggctacacacgtgctacaatggcgtaaacaaagagaagcgaactcgcgagggtaagcaaatctcaaaaataacgtctcagttcggattgtagtctgcaactcgactacatgaagctggaatcgctagtaatcgcagatcagaatgctgcggtgaatacgttcccgggtcttgtacacaccgcccgtcacaccatgggagtcagtaacgcccgaagtcagtgacccaaccgtaaggnnnnng

SEQ ID NO: 260 - DNA, 1389 bp, Eubacterium rectale
  modified_base (9)..(9): a, c, t, g, unknown or other
  modified_base (40)..(40): a, c, t, g, unknown or other
tgcagtcgnacgaagcactttatttgatttccttcgggantgattattttgtgactgagtggcggacgggtgagtaacgcgtgggtaacctgccttgtacagggggataacagttggaaacggctgctaataccgcataagcgcacagcatcgcatgatgcagtgtgaaaaactccggtggtataagatggacccgcgttggattagctagttggtgaggtaacggcccaccaaggcgacgatccatagccgacctgagagggtgaccggccacattgggactgagacacggcccaaactcctacgggaggcagcagtggggaatattgcacaatgggcgaaagcctgatgcagcgacgccgcgtgagcgaagaagtatttcggtatgtaaagctctatcagcagggaagataatgacggtacctgactaagaagcaccggctaaatacgtgccagcagccgcggtaatacgtatggtgcaagcgttatccggatttactgggtgtaaagggagcgcaggcggtgcggcaagtctgatgtgaaagcccggggctcaaccccggtactgcattggaaactgtcgtactagagtgtcggaggggtaagcggaattcctagtgtagcggtgaaatgcgtagatattaggaggaacaccagtggcgaaggcggcttactggacgataactgacgctgaggctcgaaagcgtggggagcaaacaggattagataccctggtagtccacgccgtaaacgatgaatactaggtgttgggaagcattgcttctcggtgccgtcgcaaacgcagtaagtattccacctggggagtacgttcgcaagaatgaaactcaaaggaattgacggggacccgcacaagcggtggagcatgtggtttaattcgaagcaacgcgaagaaccttaccaagtcttgacatccttctgaccggtacttaaccgtaccttctcttcggagcaggagtgacaggtggtgcatggttgtcgtcagctcgtgtcgtgagatgttgggttaagtcccgcaacgagcgcaacccttatctttagtagccagcggtttggccgggcactctagagagactgccagggataacctggaggaaggcggggatgacgtcaaatcatcatgccccttatgacttgggctacacacgtgctacaatggcgtaaacaaagggaagcaaagctgtgaagccgagcaaatctcaaaaataacgtctcagttcggactgtagtctgcaacccgactacacgaagctggaatcgctagtaatcgcagatcagaatgctgcggtgaatacgttcccgggtcttgtacacaccgcccgtcacaccatgggagttgggaatgcccgaagccagtgacctaaccgaaag

SEQ ID NO: 261 - DNA, 1386 bp, Bacteroides uniformis
  modified_base (3)..(3): a, c, t, g, unknown or other
  modified_base (22)..(22): a, c, t, g, unknown or other
  modified_base (373)..(375): a, c, t, g, unknown or other
  modified_base (1004)..(1006): a, c, t, g, unknown or other
tcnaggggcagcatgaacttancttgctaagtttgatggcgaccggcgcacgggtgagtaacacgtatccaacctgccgatgactcggggatagcctttcgaaagaaagattaatacccgatggcataattcttccgcatggtagaattattaaagaatttcggtcatcgatggggatgcgttccattaggttgttggcggggtaacggcccaccaagccttcgatggataggggttctgagaggaaggtcccccacattggaactgagacacggtccaaactcctacgggaggcagcagtgaggaatattggtcaatggacgagagtctgaaccagccaagtagcgtgaaggatgactgccctatgggttgnnnacttcttttatacgggaataaagtgaggcacgtgtgcctttttgtatgtaccgtatgaataaggatcggctaactccgtgccagcagccgcggtaatacggaggatccgagcgttatccggatttattgggtttaaagggagcgtaggcggacgcttaagtcagttgtgaaagtttgcggctcaaccgtaaaattgcagttgatactgggtgtcttgagtacagtagaggcaggcggaattcgtggtgtagcggtgaaatgcttagatatcacgaagaactccgattgcgaaggcagcttgctggactgtaactgacgctgatgctcgaaagtgtgggtatcaaacaggattagataccctggtagtccacacagtaaacgatgaatactcgctgtttgcgatatacagtaagcggccaagcgaaagcgttaagtattccacctggggagtacgccggcaacggtgaaactcaaaggaattgacgggggcccgcacaagcggaggaacatgtggtttaattcgatgatacgcgaggaaccttacccgggcttgaattgcaactgaatgatgtggagacatgtcagccgcaaggcagttgtgaaggtgctgcatggttgtcgtcagctcnnnccgtgaggtgtcggcttaagtgccataacgagcgcaacccttatcgatagttaccatcaggttatgctggggactctgtcgagactgccgtcgtaagatgtgaggaaggtggggatgacgtcaaatcagcacggcccttacgtccggggctacacacgtgttacaatggggggtacagaaggcagctacacggcgacgtgatgctaatcccgaaagcctctctcagttcggattggagtctgcaacccgactccatgaagctggattcgctagtaatcgcgcatcagccacggcgcggtgaatacgttcccgggccttgtacacaccgcccgtcaagccatgaaagccgggggtacctgaagtgcgtaaccgcaaggagc

SEQ ID NO: 262 - DNA, 1387 bp, Bacteroides massiliensis
gaggggcagcatggtcttagcttgctaaggccgatggcgaccggcgcacgggtgagtaacgcgtatccaacctgccttacactcttggacagccttctgaaagggagattaatacaagatgttatcatgagtaagcattttcgcatgattaaaggtttaccggtgtaagatggggatgcgttccattagatagtaggcggggtaacggcccacctagtcttcgatggataggggttctgagaggaaggtcccccacattggaactgagacacggtccaaactcctacgggaggcagcagtgaggaatattggtcaatggacgagagtctgaaccagccaagtagcgtgaaggatgaaggttctatggattgtaaacttcttttatacgggaataaacgaatccacgcgtggatttttgcatgtaccgtatgaataaggatcggctaactccgtgccagcagccgcggtaatacggaggatccgagcgttatccggatttattgggtttaaagggagcgtagatgggttgttaagtcagttgtgaaagtttgcggctcaaccgtaaaattgcaattgatactggcagtcttgagtacagttgaggtaggcggaattcgtggtgtagcggtgaaatgcttagatatcacgaagaactccgattgcgaaggcagcttactaacctgtaactgacattgatgctcgaaagtgtgggtatcaaacaggattagataccctggtagtccacacggtaaacgatgaatactcgctgtaggcgatatacggtctgcggccaagcgaaagcattaagtattccacctggggagtacgccggcaacggtgaaactcaaaggaattgacgggggcccgcacaagcggaggaacatgtggtttaattcgatgatacgcgaggaaccttacccgggcttaaattgcaaccgaatatggcggaaacgccatagctagcaatagcggttgtgaaggtgctgcatggttgtcgtcagctcgtgccgtgaggtgtcggcttaagtgccataacgagcgcaacccttgccgatagttactaacaggttatgctgaggactctgtcgggactgccatcgtaagatgtgaggaaggtggggatgacgtcaaatcagcacggcccttacgtccggggctacacacgtgttacaatggggggtacagagggctgctaccacgcaagtggatgccaatcccaaaaacctctctcagttcggattgaagtctgcaacccgacttcatgaagctggattcgctagtaatcgcgcatcagccacggcgcggtgaatacgttcccgggccttgtacacaccgcccgtcaagccatgggagccgggggtacctgaagtgcgtaaccgcaaggagc

SEQ ID NO: 263 - DNA, 1380 bp, Bacteroides caccae
  modified_base (3)..(3): a, c, t, g, unknown or other
  modified_base (6)..(6): a, c, t, g, unknown or other
  modified_base (9)..(9): a, c, t, g, unknown or other
  modified_base (11)..(11): a, c, t, g, unknown or other
ttntgngtntntgcgttgcaaaccaaagctggcgacgcggcgcacgggtgagtaacacgtgatccaacctgcctcatactcggggatagcctttcgaaagaaagattaatatccgatagcatatatttcccgcatgggttttatattaaagaaattcggtatgagatggggatgcgttccattagtttgttgggggggtaacggcccaccaagactacgatggataggggttctgagaggaaggtcccccacattggaactgagacacggtccaaactcctacgggaggcagcagtgaggaatattggtcaatggacgcgagtctgaaccagccaagtagcgtgaaggatgactgccctatgggttgtaaacttcttttatatgggaataaagttgtccacgtgtggatttttgtatgtaccatatgaataaggatcggctaactccgtgccagcagccgcggtaatacggaggatccgagcgttatccggatttattgggtttaaagggagcgtaggcggattgttaagtcagttgtgaaagtttgcggctcaaccgtaaaattgcagttgatactggcagtcttgagtgcagtagaggtgggcggaattcgtggtgtagcggtgaaatgcttagatatcacgaagaactccgattgcgaaggcagctcactggagtgtaactgacgctgatgctcgaaagtgtgggtatcaaacaggattagataccctggtagtccacacagtaaacgatgaatactcgctgtttgcgatatacagtaagcggccaagcgaaagcattaagtattccacctggggagtacgccggcaacggtgaaactcaaaggaattgacgggggcccgcacaagcggaggaacatgtggtttaattcgatgatacgcgaggaaccttacccgggcttaaattgcaaatgaattatggggaaacccatacgccgcaaggcatttgtgaaggtgctgcatggttgtcgtcagctcgtgccgtgaggtgtcggcttaagtgccataacgagcgcaacccttatcttcagttactaacaggtcatgctgaggactctggagagactgccgtcgtaagatgtgaggaaggtggggatgacgtcaaatcagcacggcccttacgtccggggctacacacgtgttacaatggggggtacagaaggccgctacctggtgacaggatgccaatcccaaaaacctctctcagttcggatcgaagtctgcaacccgacttcgtgaagctggattcgctagtaatcgcgcatcagccatggcgcggtgaatacgttcccgggccttgtacacaccgcccgtcaagccatgaaagccgggggtacctgaagtacgtaaccgcaaggag

SEQ ID NO: 264 - DNA, 1195 bp, Bifidobacterium adolescentis
  modified_base (1)..(12): a, c, t, g, unknown or other
  modified_base (28)..(28): a, c, t, g, unknown or other
  modified_base (667)..(667): a, c, t, g, unknown or other
  modified_base (697)..(697): a, c, t, g, unknown or other
  modified_base (785)..(785): a, c, t, g, unknown or other
  modified_base (871)..(871): a, c, t, g, unknown or other
  modified_base (884)..(884): a, c, t, g, unknown or other
  modified_base (886)..(886): a, c, t, g, unknown or other
  modified_base (888)..(888): a, c, t, g, unknown or other
  modified_base (914)..(914): a, c, t, g, unknown or other
  modified_base (916)..(916): a, c, t, g, unknown or other
  modified_base (919)..(921): a, c, t, g, unknown or other
  modified_base (936)..(936): a, c, t, g, unknown or other
  modified_base (939)..(939): a, c, t, g, unknown or other
  modified_base (950)..(952): a, c, t, g, unknown or other
  modified_base (954)..(954): a, c, t, g, unknown or other
  modified_base (958)..(961): a, c, t, g, unknown or other
  modified_base (964)..(965): a, c, t, g, unknown or other
  modified_base (971)..(971): a, c, t, g, unknown or other
  modified_base (981)..(982): a, c, t, g, unknown or other
  modified_base (986)..(986): a, c, t, g, unknown or other
  modified_base (988)..(988): a, c, t, g, unknown or other
  modified_base (990)..(990): a, c, t, g, unknown or other
  modified_base (992)..(994): a, c, t, g, unknown or other
  modified_base (1001)..(1001): a, c, t, g, unknown or other
  modified_base (1003)..(1004): a, c, t, g, unknown or other
  modified_base (1006)..(1007): a, c, t, g, unknown or other
  modified_base (1020)..(1020): a, c, t, g, unknown or other
  modified_base (1023)..(1023): a, c, t, g, unknown or other
  modified_base (1025)..(1025): a, c, t, g, unknown or other
  modified_base (1027)..(1029): a, c, t, g, unknown or other
  modified_base (1032)..(1034): a, c, t, g, unknown or other
  modified_base (1036)..(1036): a, c, t, g, unknown or other
  modified_base (1040)..(1044): a, c, t, g, unknown or other
  modified_base (1047)..(1053): a, c, t, g, unknown or other
  modified_base (1055)..(1055): a, c, t, g, unknown or other
  modified_base (1058)..(1058): a, c, t, g, unknown or other
  modified_base (1062)..(1062): a, c, t, g, unknown or other
  modified_base (1064)..(1066): a, c, t, g, unknown or other
  modified_base (1068)..(1068): a, c, t, g, unknown or other
  modified_base (1070)..(1075): a, c, t, g, unknown or other
  modified_base (1077)..(1079): a, c, t, g, unknown or other
  modified_base (1082)..(1082): a, c, t, g, unknown or other
  modified_base (1085)..(1089): a, c, t, g, unknown or other
  modified_base (1091)..(1092): a, c, t, g, unknown or other
  modified_base (1096)..(1101): a, c, t, g, unknown or other
  modified_base (1103)..(1106): a, c, t, g, unknown or other
  modified_base (1108)..(1113): a, c, t, g, unknown or other
  modified_base (1115)..(1120): a, c, t, g, unknown or other
  modified_base (1122)..(1125): a, c, t, g, unknown or other
  modified_base (1129)..(1134): a, c, t, g, unknown or other
  modified_base (1141)..(1144): a, c, t, g, unknown or other
  modified_base (1147)..(1150): a, c, t, g, unknown or other
  modified_base (1152)..(1157): a, c, t, g, unknown or other
  modified_base (1159)..(1163): a, c, t, g, unknown or other
  modified_base (1166)..(1167): a, c, t, g, unknown or other
  modified_base (1169)..(1170): a, c, t, g, unknown or other
  modified_base (1172)..(1172): a, c, t, g, unknown or other
  modified_base (1174)..(1174): a, c, t, g, unknown or other
  modified_base (1177)..(1185): a, c, t, g, unknown or other
  modified_base (1188)..(1189): a, c, t, g, unknown or other
  modified_base (1191)..(1195): a, c, t, g, unknown or other
nnnnnnnnnnnntgcagtcgaacgggancccaggagcttgctcctgggtgagagtggcgaacgggtgagtaatgcgtgaccgacctgccccatacaccggaatagctcttggaaacgggtggtaatgccggatgctccagttgaccgcatggtcctctgggaaagcttttgcggtatgggatggggtcgcgtcctatcagcttgatggcggggtaacggcccaccatggcttcgacgggtagccggcctgagagggcgaccggccacattgggactgagatacggcccagactcctacgggaggcagcagtggggaatattgcacaatgggcgcaagcctgatgcagcgacgccgcgtgcgggatgacggccttcgggttgtaaaccgcttttgactgggagcaagcccttcggggtgagtgtacctttcgaataagcaccggctaactacgtgccagcagccgcggtaatacgtagggtgcaagcgttatccggaattattgggcgtaaagggctcgtaggcggttcgtcgcgtccggtgtgaaagtccatcgcttaacggtggatccgcgccgggtacgggcgggcttgagtgcggtaggggagactggaattcccggtgtaacggtggaatgtgtagatatcgggaagaacaccaatggcgaangcaggtctctgggccgtcactgacgctgangagcgaaagcgtggggagcgaacaggattagataccctggtagtccacgccgtaaacggtggatgctggatgtggggaccattccacngtctccgtgtcggagccaacgcgttaagcatcccgcctggggagtacggccgcaaggctaaaactcaaagaaattgacgggggccncgcacaagcggcngnancatgcggattaattcgatgcaacgcnanaannntacctgggcttgacntgntcccgacagcnnnanagannnnggnntccctncggggcgggnncacngntngnnngcatggncnncnncagctcgtgtcgnganangnnnggnnnantccnnnnngannnnnnncntcncccngnnntncnnnnnntnnnggnggnnnnnanngggnnnnnngnnnnannnnnngnnnnnngnnnngacnnnnnnatcatcnnnnccnnnncnnnnnntnnnnncanncnnananggnnnnnnnnnaanngnnnnn

SEQ ID NO: 265 - DNA, 1386 bp, Bacteroides cellulosilyticus
tgcagtcgaggggcagcatgacctagcaataggttgatggcgaccggcgcacgggtgagtaacacgtatccaacctaccggttattccgggatagcctttcgaaagaaagattaataccggatagtataacgagaaggcatctttttgttattaaagaatttcgataaccgatggggatgcgttccattagtttgttggcggggtaacggcccaccaagacatcgatggataggggttctgagaggaaggtcccccacattggaactgagacacggtccaaactcctacgggaggcagcagtgaggaatattggtcaatggacgagagtctgaaccagccaagtagcgtgaaggatgactgccctatgggttgtaaacttcttttatatgggaataaagtgagccacgtgtggctttttgtatgtaccatacgaataaggatcggctaactccgtgccagcagccgcggtaatacggaggatccgagcgttatccggatttattgggtttaaagggagcgtaggcggactattaagtcagctgtgaaagtttgcggctcaaccgtaaaattgcagttgatactggtcgtcttgagtgcagtagaggtaggcggaattcgtggtgtagcggtgaaatgcttagatatcacgaagaactccgattgcgaaggcagcttactggactgtaactgacgctgatgctcgaaagtgtgggtatcaaacaggattagataccctggtagtccacacagtaaacgatgaatactcgctgtttgcgatatacagcaagcggccaagcgaaagcattaagtattccacctggggagtacgccggcaacggtgaaactcaaaggaattgacgggggcccgcacaagcggaggaacatgtggtttaattcgatgatacgcgaggaaccttacccgggcttaaattgcaaatgaatatagtggaaacattatagccgcaaggcatttgtgaaggtgctgcatggttgtcgtcagctcgtgccgtgaggtgtcggcttaagtgccataacgagcgcaacccttatctttagttactaacaggtcatgctgaggactctagagagactgccgtcgtaagatgtgaggaaggtggggatgacgtcaaatcagcacggcccttacgtccggggctacacacgtgttacaatggggggtacagaaggcagctacacagcgatgtgatgctaatcccaaaagcctctctcagttcggattggagtctgcaacccgactccatgaagctggattcgctagtaatcgcgcatcagccacggcgcggtgaatacgttcccgggccttgtacacaccgcccgtcaagccatgaaagccgggggtacctgaagtccgtaaccgcaaggag

SEQ ID NO: 266 - DNA, 1374 bp, Coprococcus eutactus
  modified_base (10)..(10): a, c, t, g, unknown or other
tgcagtcgancgattgaagctggagcttgctccggccgatttagtggcggacgggtgagtaacgcgtgggtaacctgcctcatacagggggatagcagttggaaacgactggtaaaaccgcataagcgcacggtgtcgcatgacacagtgtgaaaacactccggtggtatgagatggacccgcgtctgattagctagttggtgaggtaacggcccaccaaggcgacgatcagtagccggcctgagagggtgaacggccacattgggactgagacacggcccaaactcctacgggaggcagcagtggggaatattgcacaatgggggaaaccctgatgcagcgacgccgcgtgagtgatgaagtatttcggtatgtaaagctctatcagcagggaagataatgacggtacctgactaagaagcaccggctaaatacgtgccagcagccgcggtaatacgtatggtgcaagcgttatccggatttactgggtgtaaagggtgcgtaggtggcaaggcaagtctgaagtgaaaatccggggctcaaccccggaactgctttggaaactgtttagctggagtacaggagaggtaagtggaattcctagtgtagcggtgaaatgcgtagatattaggaggaacaccagtggcgaaggcgacttactggactgctactgacactgaggcacgaaagcgtggggagcaaacaggattagataccctggtagtccacgccgtaaacgatgaatactaggtgttgggttccaaaggaactcggtgccgtcgcaaacgcattaagtattccacctggggagtacgttcgcaagaatgaaactcaaaggaattgacggggacccgcacaagcggtggagcatgtggtttaattcgaagcaacgcgaaaaaccttaccaagtcttgacatcctgatgacggttccttaaccggaacttttcttcggaacatcagagacaggtggtgcatggttgtcgtcagctcgtgtcgtgagatgttgggttaagtcccgcaacgagcgcaacccctatttccagtagccagcagtaagatgggcactctggagagactgccggggataacccggaggaaggtggggatgacgtcaaatcatcatgccccttatgatttgggctacacacgtgctacaatggcagttacaaagagaagcaaacctgtgaaggcgagcaaacctcaaaaaggctgtctcagttcggattgtagtctgcaactcgactacatgaagctggaatcgctagtaatcgcagatcagcatgctgcggtgaatacgttcccgggtcttgtacacaccgcccgtcacaccatgggagtcggtaacgcccgaagtcagtgacccaaccgcaag

SEQ ID NO: 267 - DNA, 1381 bp, Anaerofustis stercorihominis
  modified_base (8)..(11): a, c, t, g, unknown or other
  modified_base (14)..(15): a, c, t, g, unknown or other
tgcagtcnnnnagnngcttatgattgattcttcggaagatttcataagcggaaagtggcgaacgggtgagtaacgcgtaggtaaccaacctcatacagggggatagcccagggaaacttggattaaacccgcataagaccacgctatcgcatgataaagtggtaaaaactccggtggtatgagacggacctgcgtcttattaggtagttggtgaggtaacggctcaccaagccgacgatgagtagccgacctgagagggtgatcggccacattgggactgagacacggcccagactcctacgggaggcagcagtggggaatattgcgcaatgggggcaaccctgacgcagcaacgccgcgtgagcgatgaaggttttcggatcgtaaagctctgttctgagggaagataatgacggtacctcaggagaaagccccggctaactacgtgccagcagccgcggtaatacgtagggggcaagcgttgtccggattcactgggcgtaaagagcacgtaggcggttaattaagtcaggtgtgaaagttttcggctcaaccggaaaagtgcacttgaaactggataacttgagtatcggagaggtaagcggaattcctagtgtagcggtgaaatgcgtagagattaggaagaacaccggtggcgaaggcggcttactggacgataactgacgctgaggtgcgaaagcgtggggagcgaacaggattagataccctggtagtccacgccgtaaacgatgaatactaggtgttggggtaactcagtgccgcagttaacacattaagtattccgcctggggagtacgctcgcaagagtgaaactcaaaggaattgacgggggcccgcacaagcagcggagcatgtggtttaattcgaagcaacgcgaagaaccttaccaggtcttgacatcctttgaccgtctaagagattagactttccttcgggacaaagagacaggtggtgcatggttgtcgtcagctcgtgtcgtgagatgttgggttaagtcccgcaacgagcgcaacccttgtgtttagttactaacattcagttgaggactctagacagactgcccttgaaagagggaggaaggtggggacgacgtcaaatcatcatgccccttacgacctgggctacacacgtgctacaatggtctgtacaaagggttgcgaagcagtgatgccaagctaatctcaaaaagcagatctcagttcggattgcaggctgcaactcgcctgcatgaagtcggagttgctagtaatcgcgaatcagaatgtcgcggtgaatgcgttcccgggccttgtacacaccgcccgtcacaccacgagagttggtaacacccgaagccagtgagctaaccgtaaggaggcag

SEQ ID NO: 268 - DNA, 1379 bp, Unknown
  Description of Unknown: Clostridiales sp. FBI00268 sequence
  modified_base (3)..(3): a, c, t, g, unknown or other
tgnaagtcgagcggagacagtgagtagcttgctatgagctgttttagcggcggacgggtgagtaacgcgtgagcaacctttcccagacaggggaataacacaccgaaaggtgtactaataccgcataagaccacgggatcacatggttctggggtaaaagaattatcggtttggggtgggctcgcgtccgattaggtagttggtgaggtaacggcccaccaagccgacgatcggtagccgacctgagagggtgatcggccacattgggactgagacacggcccaaactcctacgggaggcagcagtggggaatattgggcaatggaggaaactctgacccagcaacgccgcgtggaggaagaaggttttcggatcgtaaactcctgtccttggagacgagtagaagacggtatccaaggaggaagccccggctaactacgtgccagcagccgcggtaatacgtagggggcaagcgttgtccggaataattgggcgtaaagggcgcgtaggcggctcggtaagtctggagtgaaagtcctgcttttaaggtgggaattgctttggatactgtcgggcttgagtgcaggagaggttagtggaattcccagtgtagcggtgaaatgcgtagagattgggaggaacaccagtggcgaaggcgactaactggactgtaactgacgctgaggcgcgaaagtgtggggagcaaacaggattagataccctggtagtccacactgtaaacgatgaatgctaggtgtagggggtatcgaccccttctgtgccgcagtcaacacaataagcattccgcctggggagtacggccgcaaggttgaaactcaaaggaattgacgggggcccgcacaagcagcggagcatgtggtttaattcgacgcaacgcgaagaaccttaccaggtcttgacatccacttaaacttacagagatgtaaggtgtgcttgcacaaagtgagacaggtggtgcatggttgtcgtcagctcgtgtcgtgagatgttgggttaagtcccgcaacgagcgcaacccttatcttcagttactaacgcgtgagggtgaggactctgaagagactgccggggacaactcggaggaaggtggggacgacgtcaaatcatcatgccccttatgacctgggctacacacgtgctacaatggccacgacagagagaagcgaaatcgcaaggtagagcggaactcaaaaaagtggtcccagttcggattgtgggctgcaacccgcccacatgaagtcggagttgctagtaatcgcggatcagcatgccgcggtgaatacgttcccgggccttgtacacaccgcccgtcacaccatgggagttgggagtgcccaaagccggtgaggcaaccgcaa

SEQ ID NO: 269 - DNA, 1384 bp, Alistipes putredinis
  modified_base (1383)..(1383): a, c, t, g, unknown or other
tcgaggggcagcataatggatagcaatatctatggtggcgaccggcgcacgggtgcgtaacgcgtatgcaacctacctttaacagggggataacactgagaaattggtactaataccccataatatcatagaaggcatcttttatggttgaaaattccgatggttagagatgggcatgcgttgtattagctagttggtggggtaacggctcaccaaggcgacgatacatagggggactgagaggttaaccccccacactggtactgagacacggaccagactcctacgggaggcagcagtgaggaatattggtcaatggacgcaagtctgaaccagccatgccgcgtgcaggatgacggctctatgagttgtaaactgcttttgtacgagggtaaacgcagatacgtgtatctgtctgaaagtatcgtacgaataaggatcggctaactccgtgccagcagccgcggtaatacggaggattcaagcgttatccggatttattgggtttaaagggtgcgtaggcggtttgataagttagaggtgaaatttcggggctcaaccctgaacgtgcctctaatactgttgagctagagagtagttgcggtaggcggaatgtatggtgtagcggtgaaatgcttagagatcatacagaacaccgattgcgaaggcagcttaccaaactatatctgacgttgaggcacgaaagcgtggggagcaaacaggattagataccctggtagtccacgcagtaaacgatgataactcgttgtcggcgatacacagtcggtgactaagcgaaagcgataagttatccacctggggagtacgttcgcaagaatgaaactcaaaggaattgacgggggcccgcacaagcggaggaacatgtggtttaattcgatgatacgcgaggaaccttacccgggcttgaaagttagcgacgattcttgaaagaggatttcccttcggggcgcgaaactaggtgctgcatggttgtcgtcagctcgtgccgtgaggtgtcgggttaagtcccataacgagcgcaacccctaccgttagttgccatcaggtgaagctgggcactctggcgggactgccggtgtaagccgagaggaaggtggggatgacgtcaaatcagcacggcccttacgtccggggctacacacgtgttacaatggtaggtacagagggcagctacccagcgatgggatgcgaatctcgaaagcctatctcagttcggattggaggctgaaacccgcctccatgaagttggattcgctagtaatcgcgcatcagccatggcgcggtgaatacgttcccgggccttgtacacaccgcccgtcaagccatgggagccgggggtgcctgaagttcgtgaccgcaagna

SEQ ID NO: 270 - DNA, 1277 bp, Methanobrevibacter smithii
  modified_base (6)..(6): a, c, t, g, unknown or other
  modified_base (8)..(8): a, c, t, g, unknown or other
  modified_base (17)..(17): a, c, t, g, unknown or other
  modified_base (1276)..(1276): a, c, t, g, unknown or other
tgggananccctggganctggggataatactggataggcaattattcctgtaatggttttttgtttaaatgttttttcgcctaaggatgggtctgcggccgattaggtagttggttaggtaatggcttaccaagcctttgatcggtacgggttgtgagagcaagagcccggagatggaacctgagacaaggttccaggccctacggggtgcagcaggcgcgaaacctccgcaatgtgagaaatcgcgacggggggatcccaagtgccattcttaacgggatggcttttcattagtgtaaagagcttttggaataagagctgggcaagaccggtgccagccgccgcggtaacaccggcagctctagtggtagcagtttttattgggcctaaagcgtccgtagccggtttaataagtctctggtgaaatcctgcagcttaactgtgggaattgctggagatactattagacttgagatcgggagaggttagaggtactcccagggtagaggtgaaattctgtaatcctgggaggaccgcctgttgcgaaggcgtctgactggaacgattctgacggtgagggacgaaagctaggggcgcgaaccggattagatacccgggtagtcctagctgtaaacgatgcggacttggtgttggggtggctttgagctgtcccagtgccgaagggaagctgttaagtccgccgcctgggaagtacggtcgcaagactgaaacttaaaggaattggcgggggagcaccacaacgcgtggagcctgcggtttaattggattcaacgccggacatctcaccagaggcgacagctgtatgatagccaggttgatgactttgcttgactagctgagaggaggtgcatggccgccgtcagctcgtaccgtgaggcgtcctgttaagtcaggcaacgagcgagacccacgctcttagttaccagcggatccttttttggatgccgggcacactaaggggaccgcctatgataaataggaggaaggagtggacgacggtaggtccgtatgccccgaatcctctgggcaacacgcgggctacaatggctgagacaatgggttccgacgccgaaaggcggaggtaatcctctaaacttagtcgtagttcggattgaggactgtaactcgttctcatgaagctggaatgcgtagtaatcgcgtgtcacaatcgcgcggtgaatacgtccctgctccttgcacacaccgcccgtcacgccacccaaaaagggattggatgaggatgtaatgttttgtna

SEQ ID NO: 271 - DNA, 1390 bp, Bacteroides xylanisolvens
  modified_base (924)..(924): a, c, t, g, unknown or other
gcaagtcgaggggcagcattttagtttgcgttgcaaacgtaaagatggcgaccggcgcacgggtgagtaacacgtatccaacctgccgataactcggggatagcctttcgaaagaaagattaatatccgatagtatattaaaaccgcatggttttactattaaagaatttcggttatcgatggggatgcgttccattagtttgttggcggggtaacggcccaccaagactacgatggataggggttctgagaggaaggtcccccacattggaactgagacacggtccaaactcctacgggaggcagcagtgaggaatattggtcaatggacgagagtctgaaccagccaagtagcgtgaaggatgactgccctatgggttgtaaacttcttttatatgggaataaagtattccacgtgtggaattttgtatgtaccatatgaataaggatcggctaactccgtgccagcagccgcggtaatacggaggatccgagcgttatccggatttattgggtttaaagggagcgtaggtggattgttaagtcagttgtgaaagtttgcggctcaaccgtaaaattgcagttgaaactggcagtcttgagtacagtagaggtgggcggaattcgtggtgtagcggtgaaatgcttagatatcacgaagaactccgattgcgaaggcagctcactagactgcaactgacactgatgctcgaaagtgtgggtatcaaacaggattagataccctggtagtccacacagtaaacgatgaatactcgctgtttgcgatatacagtaagcggccaagcgaaagcattaagtattccacctggggagtacgccggcaacggtgaaactcaaaggaattgacgggggcccgcacaagcggaggaacatgtggtttaattcgatgatacgcgaggaccntacccgggcttaaattgcaatgaatatctggaaacaggttagccgcaaggcatttgtgaaggtgctgcatggtggtcgtcagttcgtcccgtgaggtgtcggcttaagtgccataacgagcgcaacctttttctttagttattaccaggtcatgctgaggattttagagagactcccttcgtaagatgtgaggaaggtggggatgacgtcaaatcagcacggcccttacgtccggggttacacacgtgttccaatggggggtacagaaggcagctacctggtgacaggatgctaatcccaaaaacctctctcagttcggatcgaagtctgcaacccgacttcgtgaagctggattcgctagtaatcgcgcatcagccatggcgcggtgaatacgttcccgggccttgtacacaccgcccgtcaagccatgaaagccgggggtacctgaagtacgtaaccgcaagga

SEQ ID NO: 272 - DNA, 1381 bp, Unknown
  Description of Unknown: Clostridiales XIII sp. FBI00272 sequence
  modified_base (21)..(21): a, c, t, g, unknown or other
tgcagtcgagcgagaagctcngtgacggacgcttcggttgaagtcacgagtggaaagcggcggacgggtgagtaacgcgtaggcaacctgccctttgcagagggatagcctcgggaaaccgggattaaaacctcataataccgcagtgagacatctcacggcggtcaaagatttatcggcaaaggatgggcctgcgtctgattagttagttggtggggtaacggcctaccaaggcgacgatcagtagccgacctgagagggtgatcggccacattggaactgagacacggtccaaactcctacgggaggcagcagtggggaatattgcacaatgggggaaaccctgatgcagcaacgccgcgtgaaggatgaaggcctttgggtcgtaaacttctgttctaagggaagatagtgacggtaccttaggagcaagtcccggctaactacgtgccagcagccgcggtaatacgtagggggcaagcgttatccggaattattgggcgtaaagagtacgtaggtggttttctaagcacggggtttaaggcaatggcttaaccattgttcgccttgtgaactggaagacttgagtgcaggagaggaaagcggaattcctagtgtagcggtgaaatgcgtagatattaggaggaacaccagtggcgaaggcggctttctggactgtaactgacactgaggtacgaaagcgtggggagcaaacaggattagataccctggtagtccacgccgtaaacgatgagcactaggtgtcggggtcgcaagacttcggtgccgcagttaacgcattaagtgctccgcctggggagtacgttcgcaagaatgaaactcaaaggaattgacggggacccgcacaagcagcggagcatgtggtttaattcgaagcaacgcgaagaaccttaccagggcttgacatccctctgacagatccttaaacggatttttcttcggacagaggagacaggtggtgcatggttgtcgtcagctcgtgtcgtgagatgttgggttaagtcccgcaacgagcgcaacccttgtcattagttgccagcagtaagatgggcactctagtgagactgccggggataactcggaggaaggtggggatgacgtcaaatcatcatgccccttatgttctgggctacacacgtgctacaatggccggtacagagagaagccagaccgcgaggtggagcaaaactcaaaagccggtcccagttcggattgcaggctgcaactcgcctgcatgaagtcggagttgctagtaatcgcagatcagaatgctgcggtgaatgcgttcccgggtcttgtacacaccgcccgtcacaccatggaagttgggggcgcccgaagttggtcgagaaatagatac

SEQ ID NO: 273 - DNA, 1404 bp, Barnesiella intestinihominis
  modified_base (3)..(4): a, c, t, g, unknown or other
  modified_base (178)..(178): a, c, t, g, unknown or other
  modified_base (1225)..(1225): a, c, t, g, unknown or other
tgnnagtcgaggggcagcggggaggtagcaatacctttgccggcgaccggcgcacgggtgagtaacacgtatgcaatccacctgtaacagggggataacccggagaaatccggactaataccccataatatgggcgctccgcatggagggttcattaaagagagcaattttggttacngacgagcatgcgctccattagccagttggcggggtaacggcccaccaaagcgacgatggataggggttctgagaggaaggtcccccacattggaactgagacacggtccaaactcctacgggaggcagcagtgaggaatattggtcaatggtcggcagactgaaccagccaagtcgcgtgagggaagacggccctacgggttgtaaacctcttttgtcggagagtaaagtgcgctacgtgtagcgtattgcaagtatccgaagaaaaagcatcggctaactccgtgccagcagccgcggtaatacggaggatgcgagcgttatccggatttattgggtttaaagggtgcgtaggcggcacgccaagtcagcggtgaaatttccgggctcaacccggagtgtgccgttgaaactggcgagctagagtgcacaagaggcaggcggaatgcgtggtgtagcggtgaaatgcatagatatcacgcagaaccccgattgcgaaggcagcctgctagggtgaaacagacgctgaggcacgaaagcgtgggtatcgaacaggattagataccctggtagtccacgcagtaaacgatgaatactaactgtttgcgatacaatgtaagcggtacagcgaaagcgttaagtattccacctggggagtacgccggcaacggtgaaactcaaaggaattgacggggggcccgcacaagcggaggaacatgtggtttaattcgatgatacgcgaggaaccttacccgggctcaaacgcagggggaatgccggtgaaagccggcagctagcaatagtcacctgcgaggtgctgcatggttgtcgtcagctcgtgccgtgaggtgtcggcttaagtgccataacgagcgcaacccctatcgacagttactaacgggtgaagccgaggactctgtcgagactgccggcgcaagccgcgaggaaggtggggatgacgtcaaatcagcacggcccttacgtccggggcgacacacgtgttacaatggcaggtacagaaggcagccagtcagcaatgacgcgcgantcccgaaaacctgtctcagttcggattggagtctgcaacccgactccatgaagctggattcgctagtaatcgcgcatcagccatggcgcggtgaatacgttcccgggccttgtacacaccgcccgtcaagccatggaagccgggagtacctgaagcatgcaaccgcaaggagcgtacga

SEQ ID NO: 274 - DNA, 1405 bp, Eubacterium xylanophilum
  modified_base (975)..(975): a, c, t, g, unknown or other
  modified_base (1398)..(1400): a, c, t, g, unknown or other
tgcagtcgaacgaagcacctctcccgaagattgacacagcttgctgtagattgattcatttgaggtgactgagtggcggacgggtgagtaacgcgtgggtaacctgcctcatagagggggacaacagttggaaacgactgctaataccgcatagtaagaaaaattcgcatgttttcttcttgaaagatttatcgctatgagatggacccgcgtctgattagctagttggtaaggtaacggcttaccaaggcgacgatcagtagccggcttgagagagtgaacggccacattgggactgagacacggcccaaactcctacgggaggcagcagtggggaatattgcacaatgggggaaaccctgatgcagcgacgccgcgtgagtgaagaagtatttcggtatgtaaagctctatcagcagggaagataatgacggtacctgactaagaagccccggctaactacgtgccagcagccgcggtaatacgtagggggcaagcgttatccggatttactgggtgtaaagggtgcgtaggtggcaaggcaagtcagatgtgaaagcccggggctcaaccccggtactgcatttgaaactgtctagctagagtgcaggagaggtaagcggaattcctagtgtagcggtgaaatgcgtagatattaggaggaacaccagtggcgaaggcggcttactggactgtaactgacactgaggcacgaaagcgtggggagcaaacaggattagataccctggtagtccacgccgtaaacgatgaatactaggtgtcggggcccacagggcttcggtgccgcagcaaacgcattaagtattccacctggggagtacgttcgcaagaatgaaactcaaaggaattgacggggacccgcacaagcggtggagcatgtggtttaattcgaagcaacgcgaagaaccttaccaagtcttgacatccttctgaccgttccttagccggaacttnccttcggagcagaagtgacaggtggtgcatggttgtcgtcagctcgtgtcgtgagatgttgggttaagtcccgcaacgagcgcaacccttatccttagtagccagcggttcggccgggcactctggggagactgccggagataatccggaggaaggtggggatgacgtcaaatcatcatgccccttatgacttgggctacacacgtgctacaatggcggtaacaaagggaagcagcctcgcgagagtgagcaaaccccaaaaatgccgtctcagttcggattgtagtctgcaactcgactacatgaagctggaatcgctagtaatcgcagatcagaatgctgcggtgaatacgttcccgggtcttgtacacaccgcccgtcacaccatgggagtcggatatgcccgaagccagtgacccaacnnnaagga

SEQ ID NO: 275 - DNA, 1392 bp, Unknown
  Description of Unknown: Holdemanella biformis sequence
  modified_base (3)..(3): a, c, t, g, unknown or other
  modified_base (1381)..(1381): a, c, t, g, unknown or other
  modified_base (1383)..(1386): a, c, t, g, unknown or other
cgnacgagaggaaggaaagcttgcttttctgaatctagtggcgaacgggtgagtaacacgtaggtaacctgcccatgtgcccgggataacttctggaaacggatgctaaaaccggataggtagcagacaagcatttgactgctattaaagtggctaaggccatgaacatggatggacctgcggtgcattagctagttggtgaggtaacggcccaccaaggcgacgatgcatagccggcctgagagggcggacggccacattgggactgagacacggcccaaactcctacgggaggcagcagtagggaattttcgtcaatggggggaaccctgaacgagcaatgccgcgtgagtgaggaaggtcttcggatcgtaaagctctgttgtaagagaaaaacgacattcatagggaatgatgagtgagtgatggtatcttaccagaaagtcacggctaactacgtgccagcagccgcggtaatacgtaggtggcgagcgttatccggaatgattgggcgtaaagggtgcgtaggtggcagaacaagtctggagtaaaaggtatgggctcaacccgtactggctctggaaactgttcagctagagaacagaagaggacggcggaactccatgtgtagcggtaaaatgcgtagatatatggaagaacaccggtggcgaaggcggccgtctggtctgttgctgacactgaagcacgaaagcgtggggagcaaataggattagataccctagtagtccacgccgtaaacgatgagaactaggtgttgggggaataactcagtgccgcagttaacgcaataagttctccgcctggggagtatgcacgcaagtgtgaaactcaaaggaattgacgggggcccgcacaagcggtggagtatgtggtttaattcgaagcaacgcgaagaaccttaccaggccttgacatcccttgcagaggtatagagatatatccgaggttatcaaggagacaggtggtgcatggttgtcgtcagctcgtgtcgtgagatgttgggttaagtcccgcaacgagcgcaacccttgtgatatgttactaacattgagttgaggactcatatcagactgccggtgataaaccggaggaaggtggggatgacgtcaaatcatcatgccccttatggcctgggctacacacgtactacaatggcgtctacaaagagcggcaagcctgtgaaggcaagcgaatctcataaaggacgtctcagttcggattgaagtctgcaacccgacttcatgaagctggaatcgctagtaatcgcgaatcagcatgtcgcggtgaatacgttctcgggccttgtacacaccgcccgtcaaaccatgggagttggtaatgcccgaagccggtggcatancnnnngaggag

SEQ ID NO: 276 - DNA, 1391 bp, Dorea formicigenerans
  modified_base (2)..(2): a, c, t, g, unknown or other
  modified_base (4)..(5): a, c, t, g, unknown or other
  modified_base (1386)..(1388): a, c, t, g, unknown or other
tncnntgcagtcgagcgaagcacttaagtttgattcttcggatgaagacttttgtgactgagcggcggacgggtgagtaacgcgtgggtaacctgcctcatacagggggataacagttagaaatggctgctaataccgcataagaccacagtactgcatggtacagtggtaaaaactccggtggtatgagatggacccgcgtctgattaggtagttggtgaggtaacggcccaccaagccgacgatcagtagccgacctgagagggtgaccggccacattgggactgagacacggcccagactcctacgggaggcagcagtggggaatattgcacaatgggcgaaagcctgatgcagcgacgccgcgtgaaggatgaagtatttcggtatgtaaacttctatcagcagggaagaaaatgacggtacctgactaagaagccccggctaactacgtgccagcagccgcggtaatacgtagggggcaagcgttatccggatttactgggtgtaaagggagcgtagacggctgtgcaagtctgaagtgaaaggcatgggctcaacctgtggactgctttggaaactgtgcagctagagtgtcggagaggtaagtggaattcctagtgtagcggtgaaatgcgtagatattaggaggaacaccagtggcgaaggcggcttactggacgatgactgacgttgaggctcgaaagcgtggggagcaaacaggattagataccctggtagtccacgccgtaaacgatgactgctaggtgtcgggtagcaaagctattcggtgccgcagctaacgcaataagcagtccacctggggagtacgttcgcaagaatgaaactcaaaggaattgacggggacccgcacaagcggtggagcatgtggtttaattcgaagcaacgcgaagaaccttacctgatcttgacatcccgatgaccgcttcgtaatggaagcttttcttcggaacatcggtgacaggtggtgcatggttgtcgtcagctcgtgtcgtgagatgttgggttaagtcccgcaacgagcgcaacccttatcttcagtagccagcatttaggatgggcactctggagagactgccagggataacctggaggaaggtggggatgacgtcaaatcatcatgccccttatgaccagggctacacacgtgctacaatggcgtaaacaaagggaagcagagccgcgaggccgagcaaatctcaaaaataacgtctcagttcggattgtagtctgcaactcgactacatgaagctggaatcgctagtaatcgcagatcagaatgctgcggtgaatacgttcccgggtcttgtacacaccgcccgtcacaccatgggagtcagtaacgcccgaagtcagtgacccaannngaa

SEQ ID NO: 277 - DNA, 1388 bp, Alistipes onderdonkii
  modified_base (1384)..(1384): a, c, t, g, unknown or other
tgcagtcgaggggcatcacgaggtagcaatactttggtggcgaccggcgcacgggtgcgtaacgcgtatgtaacctacctataacaggggcataacactgagaaattggtactaattccccataatattcggagaggcatctctccgggttgaaaactccggtggttatagatggacatgcgttgtattagctagttggtgaggtaacggctcaccaaggcaacgatacatagggggactgagaggttaaccccccacactggtactgagacacggaccagactcctacgggaggcagcagtgaggaatattggtcaatggacgcaagtctgaaccagccatgccgcgtgcaggaagacggctctatgagttgtaaactgcttttgtacgagggtaaactcacctacgcgtaggtgactgaaagtatcgtacgaataaggatcggctaactccgtgccagcagccgcggtaatacggaggattcaagcgttatccggatttattgggtttaaagggtgcgtaggcggtttgataagttagaggtgaaatcccggggcttaactccggaactgcctctaatactgttagactagagagtagttgcggtaggcggaatgtatggtgtagcggtgaaatgcttagagatcatacagaacaccgattgcgaaggcagcttaccaaactatatctgacgttgaggcacgaaagcgtggggagcaaacaggattagataccctggtagtccacgcagtaaacgatgataactcgttgtcggcgatacacagtcggtgactaagcgaaagcgataagttatccacctggggagtacgttcgcaagaatgaaactcaaaggaattgacgggggcccgcacaagcggaggaacatgtggtttaattcgatgatacgcgaggaaccttacccgggcttgaaagttactgacgattctggaaacaggatttcccttcggggcaggaaactaggtgctgcatggttgtcgtcagctcgtgccgtgaggtgtcgggttaagtcccataacgagcgcaacccctaccgttagttgccatcaggtcaagctgggcactctggcgggactgccggtgtaagccgagaggaaggtggggatgacgtcaaatcagcacggcccttacgtccggggctacacacgtgttacaatggtaggtacagagggtcgctactccgtgaggagatgccaatctcgaaagcctatctcagttcggattggaggctgaaacccgcctccatgaagttggattcgctagtaatcgcgcatcagccatggcgcggtgaatacgttcccgggccttgtacacaccgcccgtcaagccatggaagctgggggtgcctgaagttcgtgaccgcaangagc

SEQ ID NO: 278 - DNA, 1398 bp, Eubacterium ventriosum
  modified_base (10)..(10): a, c, t, g, unknown or other
  modified_base (20)..(20): a, c, t, g, unknown or other
  modified_base (24)..(24): a, c, t, g, unknown or other
  modified_base (31)..(34): a, c, t, g, unknown or other
  modified_base (41)..(41): a, c, t, g, unknown or other
  modified_base (51)..(51): a, c, t, g, unknown or other
tgcagtcgancgaagcaccnttgngacagannnnttcgganggacagactntggtgacttagtggcggacgggtgagtaacgcgtgggtaacctgccctgtactgggggacaacagttggaaacgactgctaataccgcataagcgcacagcatcgcatgatgcagtgtgaaaaactccggtggtacaggatggacccgcgtctgattagctagttggtgaggtaacggcttaccaaggcaacgatcagtagccgacttgagagagtgatcggccacattgggactgagacacggcccaaactcctacgggaggcagcagtggggaatattgcacaatgggggaaaccctgatgcagcgacgccgcgtgaaggaagaagtatttcggtatgtaaacttctatcagcaaggaagaaaatgacggtacttgactaagaagccccggctaaatacgtgccagcagccgcggtaatacgtatggggcaagcgttatccggatttactgggtgtaaagggagcgtaggcggtaagacaagtcagaagtgaaaggctggggctcaaccctgggactgcttttgaaactgtctaactagagtgcaggagaggtaagtggaattcctagtgtagcggtgaaatgcgtagatattaggaggaacaccagtggcgaaggcggcttactggactgtaactgacgctgaggctcgaaagcgtggggagcaaacaggattagataccctggtagtccacgccgtaaacgatgaatactaggtgttgggggaacaatagttcttcggtgccgcagcaaacgcaataagtattccacctggggagtacgttcgcaagaatgaaactcaaaggaattgacggggacccgcacaagcggtggagcatgtggtttaattcgaagcaacgcgaagaaccttacctgctcttgacatcccactgaccggtcagtaatgtgaccttttcttcggaacagtggagacaggtggtgcatggttgtcgtcagctcgtgtcgtgagatgttgggttaagtcccgcaacgagcgcaacccttatctttagtagccagcatttaagatgggcactctagagagactgccagggataacctggaggaaggtggggatgacgtcaaatcatcatgccccttatgagcagggctacacacgtgctacaatggcgtaaacaaagggaagcgagaccgtgaggtggagccaatcccaaaaataacgtctcagttcggattgtagtctgcaactcgactacatgaagctggaatcgctagtaatcgcgaatcagaatgtcgcggtgaatacgttcccgggtcttgtacacaccgcccgtcacaccatgggagttggatatgcccgaagtcagtgacccaaccgtaaggagg

SEQ ID NO: 279 - DNA, 1394 bp, Coprococcus comes
  modified_base (4)..(4): a, c, t, g, unknown or other
  modified_base (22)..(25): a, c, t, g, unknown or other
  modified_base (41)..(42): a, c, t, g, unknown or other
  modified_base (236)..(236): a, c, t, g, unknown or other
  modified_base (1075)..(1076): a, c, t, g, unknown or other
  modified_base (1134)..(1135): a, c, t, g, unknown or other
  modified_base (1382)..(1382): a, c, t, g, unknown or other
  modified_base (1390)..(1391): a, c, t, g, unknown or other
tgcngtcgaacgaagcacttannnntgattcttcggatgannaggtttgtgactgagtggcggacgggtgagtaacgcgtgggtaacctgcctcatacagggggataacagttagaaatgactgctaataccgcaaaagaccacggagccgcatggctcagtgggaaaaactccggtggtatgagatggacccgcgtctgattaggtagttggtggggtaacggcctaccaagccnacgatcagtagccgacctgagagggtgaccggccacattgggactgagacacggcccaaactcctacgggaggcagcagtggggaatattgcacaatgggggaaaccctgatgcagcgacgccgcgtgagcgaagaagtatttcggtatgtaaagctctatcagcagggaagaaaatgacggtacctgactaagaagcaccggctaaatacgtgccagcagccgcggtaatacgtatggtgcaagcgttatccggatttactgggtgtaaagggagcgtagacggctgtgtaagtctgaagtgaaagcccggggctcaaccccgggactgctttggaaactatgcagctagagtgtcggagaggtaagtggaattcccagtgtagcggtgaaatgcgtagatattgggaggaacaccagtggcgaaggcggcttactggacgatgactgacgttgaggctcgaaagcgtggggagcaaacaggattagataccctggtagtccacgccgtaaacgatgactactaggtgtcggggagcaaagctcttcggtgccgcagcaaacgcaataagtagtccacctggggagtacgttcgcaagaatgaaactcaaaggaattgacggggacccgcacaagcggtggagcatgtggtttaattcgaagcaacgcgaagaaccttacctgctcttgacatcccggtgaccggcatgtaatgatgccttttcttcggaacaccggtgacaggtggtgcatggttgtcgtcagctcgtgtcgtgagatgttgggttaagtcccgcaacgagcgcaacccttatcttcagtagccagcattttggatnngcactctggagagactgccagggataacctggaggaaggtggggatgacgtcaaatcnncatgccccttatgagcagggctacacacgtgctacaatggcgtaaacaaagggaagcgaacctgcgagggtaagcaaatctcaaaaataacgtctcagttcggattgtagtctgcaactcgactacatgaagctggaatcgctagtaatcgcgaatcagcatgtcgcggtgaatacgttcccgggtcttgtacacaccgcccgtcacaccatgggagttggtaacgcccgaagtcagtgacccaacngtaagganngag

SEQ ID NO: 280 - DNA, 1394 bp, Bacteroides thetaiotaomicron
  modified_base (2)..(2): a, c, t, g, unknown or other
  modified_base (1392)..(1393): a, c, t, g, unknown or other
cngtcgaggggcagcatttcagtttgcttgcaaactggagatggcgaccggcgcacgggtgagtaacacgtatccaacctgccgataactcggggatagcctttcgaaagaaagattaatacccgatggtataatcagaccgcatggtcttgttattaaagaatttcggttatcgatggggatgcgttccattaggcagttggtgaggtaacggctcaccaaaccttcgatggataggggttctgagaggaaggtcccccacattggaactgagacacggtccaaactcctacgggaggcagcagtgaggaatattggtcaatgggcgcaggcctgaaccagccaagtagcgtgaaggatgactgccctatgggttgtaaacttcttttatatgggaataaagttttccacgtgtggaattttgtatgtaccatatgaataaggatcggctaactccgtgccagcagccgcggtaatacggaggatccgagcgttatccggatttattgggtttaaagggagcgtaggtggacagttaagtcagttgtgaaagtttgcggctcaaccgtaaaattgcagttgatactggctgtcttgagtacagtagaggtgggcggaattcgtggtgtagcggtgaaatgcttagatatcacgaagaactccgattgcgaaggcagctcactggactgcaactgacactgatgctcgaaagtgtgggtatcaaacaggattagataccctggtagtccacacagtaaacgatgaatactcgctgtttgcgatatacagtaagcggccaagcgaaagcattaagtattccacctggggagtacgccggcaacggtgaaactcaaaggaattgacgggggcccgcacaagcggaggaacatgtggtttaattcgatgatacgcgaggaaccttacccgggcttaaattgcatttgaatatattggaaacagtatagccgtaaggcaaatgtgaaggtgctgcatggttgtcgtcagctcgtgccgtgaggtgtcggcttaagtgccataacgagcgcaacccttatctttagttactaacaggtcatgctgaggactctagagagactgccgtcgtaagatgtgaggaaggtggggatgacgtcaaatcagcacggcccttacgtccggggctacacacgtgttacaatggggggtacagaaggcagctacctggtgacaggatgctaatcccaaaagcctctctcagttcggatcgaagtctgcaacccgacttcgtgaagctggattcgctagtaatcgcgcatcagccatggcgcggtgaatacgttcccgggccttgtacacaccgcccgtcaagccatgaaagccgggggtacctgaagtacgtaaccgcaaggagcnnc

SEQ ID NO: 281 - DNA, 1379 bp, Unknown
  Description of Unknown: Senegalimassilia anaerobia sequence
  modified_base (21)..(21): a, c, t, g, unknown or other
  modified_base (23)..(23): a, c, t, g, unknown or other
  modified_base (1353)..(1358): a, c, t, g, unknown or other
tgcagtcgaacgatgaaaccnancctcgggcggacatgaagtggcgaacgggtgagtaacacgtgaccgacctgccccccgcccagggacagccccccgaaagggggattaatacctggtactccggaagcggcgcatgccgcggccgggaaagctccggcggcgggggatggggtcgcggcccatcaggtagacggcggggcagaggcccaccgtgccgacgacgggtagccgggttgagagaccgaccggccacattgggactgagatacggcccagactcctacgggaggcagcagtggggaattttgcgcaatgggggcaaccctgacgcagcaacgccgcgtgcgggacgaaggcgtccgcgtcgtaaaccgctttcagcggggaacacttgaacgagggtacccgcagaagaagccccggctaaatacgtgccagcagccgcggtaatacgtatggggcgagcgttatccggattcattgggcgtaaagcgcgcgtaggcggagcgctaagcgggacctctaacccgagggctcaacccccggccgggtcccgaactggcgctctcgagtgcggtaggggagagcggaattcccggtgtagcggtggaatgcgcagatatcgggaagaacaccgacggcgaaggcagctctctgggccgaaactgacgctgaggcgcgaaagctgggggagcgaacaggattagataccctggtagtcccagccgtaaacgatgggcgctaggtgtgggggagcagatcccccgtgccgcagccaacgcattaagcgccccgcctggggagtacggccgcaaggctaaaactcaaaggaattgacgggggcccgcacaagcagcggagcatgtggcttaattcgaagcaacgcgaagaaccttaccagggcttgacatgcaggtgaagcggcggagacgccgtggccgagaggagcctgcacaggtggtgcatggctgtcgtcagctcgtgtcgtgagatgttgggttaagtcccgcaacgagcgcaacccctgccccgtgttgccagcattcagttggggactcgcgggggactgccggcgtcaagccggaggaaggtggggacgacgtcaagtcatcatgccccttatgccctgggccgcacacgtgctacaatggccggtacagagggttgcgaccccgcgagggggagcggatcccgcaaagccggccccagttcggatcggaggctgcaacccgcctccgtgaagccggagttgctagtaatcgcggatcagcacgccgcggtgaatacgttcccgggccttgtacacaccgcccgtcacaccacccgagtcgtctgcacccgaagccgccnnnnnnaacccccctgggggcggaggc

SEQ ID NO: 282 - DNA, 1383 bp, Porphyromonas asaccharolytica
  modified_base (1382)..(1382): a, c, t, g, unknown or other
tgcaagtcgaggggcagcgagatgtagcaatacgtcgtcggcgaccggcgaatgggtgagtaacacgtatgcaacttacctcttagtggtgaataactcgatgaaagtcgaactaatacaccatattctccttagatcacatgagaagaggaggaaagattaatcgctaagagataggcctgcgttccattagctagttggtaaggtaacggcttaccaaggcaacgatggatagggggactgagaggttgaccccccacattgacactgagatacgggtcaaactcctacgggaggcagcagtgaggaatattggtcaatgggcgagagcctgaaccagccaagtcgcgtgaaggaagactgcccgcaagggttgtaaacttcttttgtatgggattaaagtcacctacgtgtaggtgtttgcagttaccatacgaataagcatcggctaactccgtgccagcagccgcggtaatacggaggatgcgagcgttatccggaattattgggtttaaagggtgcgtaggttgcaagggaagtcaggggtgaaaagctgtagctcaactatggtcttgcctttgaaactctctagctagagtgtactggaggtacgtggaacgtgtggtgtagcggtgaaatgcatagatatcacacagaactccgattgcgcaggcagcgtactacattacaactgacactgaagcacgaaagcgtgggtatcaaacaggattagataccctggtagtccacgcagtaaacgatgaatactagatctatgcgatatacagtatgggtctaagcgaaagcgataagtattccacctggggagtacgccggcaacggtgaaactcaaagagattggcgggggtccgcacaagcggaggaacatgtggtttaattcgatgatacgcgaggaaccttacccgggattgaaatgtagatgcatgaggctgagaggtctcttcccttcggggcttctatgtaggtgctgcatggttgtcgtcagctcgtgccgtgaggtgtcggcttaagtgccataacgagcgcaacccgcgtcgatagttactaacgagttaagtcgaggactctatcgagacagccgtcgtaagacgagaggaaggagcggatgacgtcaaatcagcacggcccttacatccggggcgacacacgtgttacaatggtagggacagcgagcagccatctggcgacagagagctaatctataaaccctatcccagttcggatcggagtctgcaactcgactctgtgaagctggattcgctagtaatcgcgcatcagccatggcgcggtgaatacgttcccggaccttgcacacaccgcccgtcaagccatgggagtcgggggtacctgaagagcgtganc

SEQ ID NO: 283 - DNA, 1395 bp, Ruminococcus bromii
  modified_base (9)..(10): a, c, t, g, unknown or other
  modified_base (19)..(19): a, c, t, g, unknown or other
  modified_base (23)..(23): a, c, t, g, unknown or other
  modified_base (25)..(26): a, c, t, g, unknown or other
  modified_base (29)..(30): a, c, t, g, unknown or other
tgcagtcgnncggaacttntttnanngannttcttcggaatgattttgattaagtttagtggcggacgggtgagtaacgcgtgagtaacctgcctctaagaggggaataacattctgaaaagaatgctaataccgcataacatatatttatcgcatggtagatatatcaaagatttatcgcttagagatggactcgcgtccgattagttagttggtgaggtaacggctcaccaagaccgcgatcggtagccggactgagaggttgaacggccacattgggactgagacacggcccagactcctacgggaggcagcagtgggggatattgcgcaatgggggaaaccctgacgcagcaacgccgcgtgaaggatgaaggtcttcggattgtaaacttcttttattaaggacgaagaaagtgacggtacttaatgaataagctccggctaactacgtgccagcagccgcggtaatacgtagggagcaagcgttgtccggatttactgggtgtaaagggtgcgtaggcggctttgcaagtcagatgtgaaatctatgggctcaacccatagcctgcatttgaaactgcagagcttgagtgaagtagaggcaggcggaattccccgtgtagcggtgaaatgcgtagagatggggaggaacaccagtggcgaaggcggcctgctgggctttaactgacgctgaggcacgaaagcgtgggtagcaaacaggattagataccctggtagtccacgctgtaaacgatgattactaggtgtggggggtctgaccccttccgtgccggagttaacacaataagtaatccacctggggagtacggccgcaaggttgaaactcaaaggaattgacgggggcccgcacaagcagtggagtatgtggtttaattcgaagcaacgcgaagaaccttaccaggtcttgacatcctactaacgagatagagatatgttaggtgcccttcggggaaagtagagacaggtggtgcatggttgtcgtcagctcgtgtcgtgagatgttgggttaagtcccgcaacgagcgcaacccttgctattagttgctacgcaagagcactctaataggactgccgttgacaaaacggaggaaggtggggacgacgtcaaatcatcatgccccttatgacctgggctacacacgtactacaatggacattaacagagggaagcaatacagcgatgtggagcaaacccctaaaaatgttctcagttcagattgcaggctgcaacccgcctgtatgaagatggaattgctagtaatcgcagatcagcatgctgcggtgaatacgttcccgggccttgtacacaccgcccgtcacaccatgggagccggtaatacccgaagtcagtagtctaaccgcaaggaggac

SEQ ID NO: 284 - DNA, 1370 bp, Blautia obeum
  modified_base (8)..(8): a, c, t, g, unknown or other
  modified_base (15)..(15): a, c, t, g, unknown or other
  modified_base (17)..(17): a, c, t, g, unknown or other
  modified_base (19)..(22): a, c, t, g, unknown or other
gcagtcgnacgggancntnnnnttgaagcttcggcagattttgctggtttctagtggcggacgggtgagtaacgcgtgggtaacctgccttatacagggggataacaaccagaaatggttgctaataccgcataagcgcacaggaccgcatggtccggtgtgaaaaactccggtggtataagatggacccgcgttggattagctagttggcagggtaacggcctaccaaggcgacgatccatagccggcctgagagggtgaacggccacattgggactgagacacggcccagactcctacgggaggcagcagtggggaatattgcacaatgggggaaaccctgatgcagcgacgccgcgtgaaggaagaagtatctcggtatgtaaacttctatcagcagggaagatagtgacggtacctgactaagaagccccggctaactacgtgccagcagccgcggtaatacgtagggggcaagcgttatccggatttactgggtgtaaagggagcgtagacggactggcaagtctgatgtgaaaggcgggggctcaacccctggactgcattggaaactgttagtcttgagtgccggagaggtaagcggaattcctagtgtagcggtgaaatgcgtagatattaggaggaacaccagtggcgaaggcggcttactggacggtaactgacgttgaggctcgaaagcgtgggggagcaaacaggattagataccctggtagtccacgccgtaaacgatgaatactaggtgttggggagcaaagctcttcggtgccgccgcaaacgcattaagtattccacctggggagtacgttcgcaagaatgaaactcaaaggaattgacggggacccgcacaagcggtggagcatgtggtttaattcgaagcaacgcgaagaaccttaccaagtcttgacatccctctgaccgactcttaaccgagtctttccttcgggacaggggagacaggtggtgcatggttgtcgtcagctcgtgtcgtgagatgttgggttaagtcccgcaacgagcgcaacccctatccccagtagccagcagtccggctgggcactctgaggagactgccagggataacctggaggaaggcggggatgacgtcaaatcatcatgccccttatgatttgggctacacacgtgctacaatggcgtaaacaaagggaagcaagcctgcgaaggtaagcaaatcccaaaaataacgtcccagttcggactgcagtctgcaactcgactgcacgaagctggaatcgctagtaatcgcggatcagaatgccgcggtgaatacgttcccgggtcttgtacacaccgcccgtcacaccatgggagtcagtaacgcccgaagtcag

SEQ ID NO: 285 - DNA, 1383 bp, Lachnospira sp.
  modified_base (3)..(3): a, c, t, g, unknown or other
  modified_base (29)..(29): a, c, t, g, unknown or other
  modified_base (33)..(33): a, c, t, g, unknown or other
cgnacgaagcatttaagacagattttttnggantgaagttttttatgactgagtggcggacgggtgagtaacgcgtgggtaacctgcctcacacagggggatagcagttggaaacgactggtaataccgcataagcgcacagcttcgcatgaagcggtgtgaaaaactccggtggtgtgagatggacccgcgtctgattaggtagttggtgaggtaacggcccaccaagccgacgatcagtagccgacctgagagggtgaccggccacattgggactgagacacggcccagactcctacgggaggcagcagtggggaatattgcacaatggaggaaactctgatgcagcgacgccgcgtgagtgaagaagtatttcggtatgtaaagctctatcagcagggaagacagtgacggtacctgactaagaagctccggctaaatacgtgccagcagccgcggtaatacgtatggagcaagcgttatccggatttactgggtgtaaagggagtgtaggtggtatcacaagtcagaagtgaaagcccggggctcaaccccgggactgcttttgaaactgtggaactggagtgcaggagaggtaagtggaattcctagtgtagcggtgaaatgcgtagatattaggaggaacaccagtggcgaaggcggcttactggactgtaactgacactgaggctcgaaagcgtggggagcaaacaggattagataccctggtagtccacgccgtaaacgatgaatactaggtgtcggggctcataagagcttcggtgccgcagcaaacgcaataagtattccacctggggagtacgttcgcaagaatgaaactcaaaggaattgacggggacccgcacaagcggtggagcatgtggtttaattcgaagcaacgcgaagaaccttaccaagtcttgacatccttctggccggacagtaatgtgtcctttccttcgggacagaagagacaggtggtgcatggttgtcgtcagctcgtgtcgtgagatgttgggttaagtcccgcaacgagcgcaacccctatcctcagtagccagcaggtaaagctgggcactctgtggagactgccagggataacctggaggaaggtggggatgacgtcaaatcatcatgccccttatgacttgggctacacacgtgctacaatggcgtaaacaaagtgaagcgagagtgtgagcttaagcaaatcacaaaaataacgtctcagttcggattgtagtctgcaactcgactacatgaagctggaatcgctagtaatcgcgaatcagaatgtcgcggtgaatacgttcccgggtcttgtacacaccgcccgtcacaccatgggagtcggaaatgcccgaagtcggtgacctaacgtaa

SEQ ID NO: 286 - DNA, 1342 bp, Unknown
  Description of Unknown: Fusicatenibacter saccharivorans sequence
  modified_base (68)..(68): a, c, t, g, unknown or other
  modified_base (85)..(85): a, c, t, g, unknown or other
  modified_base (90)..(90): a, c, t, g, unknown or other
  modified_base (188)..(188): a, c, t, g, unknown or other
  modified_base (323)..(323): a, c, t, g, unknown or other
  modified_base (842)..(842): a, c, t, g, unknown or other
  modified_base (892)..(893): a, c, t, g, unknown or other
  modified_base (1030)..(1030): a, c, t, g, unknown or other
  modified_base (1112)..(1112): a, c, t, g, unknown or other
  modified_base (1177)..(1177): a, c, t, g, unknown or other
  modified_base (1217)..(1217): a, c, t, g, unknown or other
  modified_base (1328)..(1328): a, c, t, g, unknown or other
  modified_base (1330)..(1331): a, c, t, g, unknown or other
gactgagcggcggaggggtgataacgcgtgggtgacctgccccatacggggggataacatctggaaanggctgctaataccgcanaagcncacagagctgcatggctcagtgtgaaaaactcctgtggtatgggatgggcccgcgtctgattaggcagttgggggggtaacggcccaccaaaccgacnatcagtagccggcctgagagggcgaccggccacattgagactgagacacggcccaaactcctacgggaggcagcagtggggaatattgcacaatgggggaaaccctgatgcagcgaccccgcgagagcgaagaantatttcggtatgtaaatctctctcaagggggaaaataaagacggtacctgactaaaaagccccggctactacgtgccagcagccgcggtaatacgtagggggcagctttatccggatttactgggtgtaaagggagcgtagacggcaaggcaagtctgatgtgaaaacccagggcttaaccctgggactgcattggaaactgtctggctcgagtgccggagaggtaagcggaattcctagtgtagcggtgaaatgcgtagatattaggaagaacaccagtggcgaaggcggcttactggacggtaactgacgttgaggctcgaaagcgtggggagcaaacaggattagataccctggtagtccacgccgtaaacgatgaatgctaggtgttggggagcaaagcttttcggtgccgccgcaaacgcattaagcattccacctggggagtacgttcgcaagaatgaaactcaaaggaattgacggggacccgcaccagcggtggagcatgtggtttaattngaagcaacgcgaagaaccttaccaggtcttgacatcccgatgaccggttnntaacggggccttctttttggagcattggagacaggtggtgcatggttgttgtcagctcgtgtcgtgagatgttgggttaagtcccgcaacgagcgcaacccttatcctccgtagccagcaagtaaagttgggcactntgtggagactgccagggataacctggaggaaggtggggatgacgtcaaatcatcatgccccttatgatttgggctacacacntgctacaatggcgtaaacaaagggaggcaaagccgcgaggtggagcaaatcccaaaaaaaacgtntcagttcggactgcagtttgcaacttgactgcacgaagcnggaatcgcttgtaatcgcgaatcagaatgtcgcggtgaatacgttcccgggttttgtacacaccgcccgtcacaccatgggagttggtaacgcccgaagtcagtgacccancnntcaggagggag

SEQ ID NO: 287 - DNA, 1372 bp, Alistipes shahii
  modified_base (3)..(3): a, c, t, g, unknown or other
  modified_base (17)..(17): a, c, t, g, unknown or other
  modified_base (22)..(26): a, c, t, g, unknown or other
  modified_base (30)..(30): a, c, t, g, unknown or other
  modified_base (98)..(98): a, c, t, g, unknown or other
  modified_base (107)..(107): a, c, t, g, unknown or other
tcngaggggcagcacgngtgtnnnnngacnctggtggcgacgggcgcacgggtgcgtaacgcgtatgcaaccgaccgttaacagggggataacactgnggaaattgntgctaataccccataacatcaggaccggcgtcggttttggttgaaaactccggtggttatggatgggcatgcgttgtattaggtggttggtgaggtaacggctcaccagggcaacgatacatagggggactgagaggttaaccccccacattggtactgagacacggaccaaactcatacgggaggcagcagtgaggaatattggtcaatggacgcaagtctgaaccagccatgccgcgtgcaggaagacggctctatgagttgtaaactgcttttgtacgagggtaaacgctcttacgtgtaagagcctgaaagtatcgtacgaataaggatcggctaactccgtgccagcagccgcggtaatacggaggatccaagcgttatccggatttattgggtttaaagggtgcgtaggcggtttgataagttagaggtgaaataccggtgcttaacaccggaactgcctctaatactgttgaactagagagtagttgcggtaggcggaatgtatggtgtagcggtgaaatgcttagagatcatacagaacaccgattgcgaaggcagcttaccaaactatatctgacgttgaggcacgaaagcgtggggagcaaacaggattagataccctggtagtccacgcagtaaacgatgataactcgctgtcggcgatacacagtcggcggctaagcgaaagcgataagttatccacctggggagtacgttcgcaagaatgaaactcaaaggaattgacgggggcccgcacaagcggaggaacatgtggtttaattcgatgatacgcgaggaaccttacccgggcttgaaagttactgacgattctggaaacaggatttcccttcggggcaggaaactaggtgctgcatggttgtcgtcagctcgtgccgtgaggtgtcgggttaagtcccataacgagcgcaacccctaccgttagttgccatcaggtcaagctgggcactctggcgggactgccggtgtaagccgagaggaaggtggggatgacgtcaaatcagcacggcccttacgtccggggctacacacgtgttacaatggtaggtacagagggcagctacccagtgatgggatgcgaatctcgaaagcctatctcagttcggatcggaggctgaaacccgcctccgtgaagttggattcgctagtaatcgcgcatcagccatggcgcggtgaatacgttcccgggccttgtacacaccgcccgtcaagccatggaagctgggggtgcctgaagttcg

SEQ ID NO: 288 - DNA, 1398 bp, Blautia hydrogenotrophica
  modified_base (1393)..(1393): a, c, t, g, unknown or other
tgcagtcgaacgaagcgatggagaacggagatttcggttgaagttttctattgactgagtggcggacgggtgagtaacgcgtgggtaacctgccctatacagggggataacagttagaaatgactgctaataccgcataagcgcacagcttcgcatgaagcggtgtgaaaaactgaggtggtataggatggacccgcgttggattagctagttggtgaggtaacggcccaccaaggcgacgatccatagccggcctgagagggtgaacggccacattgggactgagacacggcccaaactcctacgggaggcagcagtggggaatattgcacaatgggggaaaccctgatgcagcgacgccgcgtgaaggaagaagtatctcggtatgtaaacttctatcagcagggaagaaagtgacggtacctgactaagaagccccggctaattacgtgccagcagccgcggtaatacgtaaggggcaagcgttatccggatttactgggtgtaaagggagcgtagacggtttggcaagtctgatgtgaaaggcatgggctcaacctgtggactgcattggaaactgtcagacttgagtgccggagaggcaagcggaattcctagtgtagcggtgaaatgcgtagatattaggaggaacaccagtggcgaaggcggcctgctggacggtaactgacgttgaggctcgaaagcgtggggagcaaacaggattagataccctggtagtccacgctgtaaacgatgaatactaggtgtcgggtggcaaagccattcggtgccgcagcaaacgcaataagtattccacctggggagtacgttcgcaagaatgaaactcaaaggaattgacggggacccgcacaagcggtggagcatgtggtttaattcgaagcaacgcgaagaaccttaccaaatcttgacatccctctgaccgggaagtaatgttcccttttcttcggaacagaggagacaggtggtgcatggttgtcgtcagctcgtgtcgtgagatgttgggttaagtcccgcaacgagcgcaacccttattcttagtagccagcaggtaaagctgggcactctagggagactgccagggataacctggaggaaggtggggatgacgtcaaatcatcatgccccttatgatttgggctacacacgtgctacaatggcgtaaacaaagggaagcgaaggggtgacctggagcaaatctcaaaaataacgtctcagttcggattgtagtctgcaactcgactacatgaagctggaatcgctagtaatcgcgaatcagaatgtcgcggtgaatacgttcccgggtcttgtacacaccgcccgtcacaccatgggagtcagtaacgcccgaagtcagtgacccaaccgaaagganggagc

SEQ ID NO: 289 - DNA, 1388 bp, Oxalobacter formigenes
aacggcagcatgggggcaaccctgatggcgagtggcgaacgggtgagtaatatatcggaacgtacccaagagtgggggacaaccagtcgaaagattggctaataccgcatacgatctaaggatgaaagtgggggaccttcgggcctcacgctcctggagcggccgatagctgattagctagttggtggggtaaaggcctaccaaggcgatgatcagtagctggtctgagaggacgatcagccacactgggactgagacacggcccagactcctacgggaggcagcagtggggaattttggacaatgggggaaaccctgatccagcaatgccgcgtgagtgaagaaggccttcgggttgtaaagctcttttgtcagggaagaaattgattgggctaatatcccgattagatgacggtacctgaagaataagcaccggctaactacgtgccagcagccgcggtaatacgtagggtgcgagcgttaatcggaattactgggcgtaaagcgtgcgcaggcggttgtgtaagacagatgtgaaatgcccgggctcaacctgggaattgcatttgtgactgcacggctagagtgtgtcagaggggggtagaattccacgtgtagcagtgaaatgcgtagatatgtggaggaataccgatggcgaaggcagccccctgggataacactgacgctcatgcacgaaagcgtggggagcaaacaggattagataccctggtagtccacgccctaaacgatgtcgactagttgttgggtcttaattgacttagtaacgcagctaacgcgtgaagtcgaccgcctggggagtacggtcgcaagattaaaactcaaaggaattgacggggacccgcacaagcggtggatgatgtggattaattcgatgcaacgcgaaaaaccttacctacccttgacatgtcaggaatcccgaagagatttgggagtgctcgaaagagagcctgaacacaggtgctgcatggctgtcgtcagctcgtgtcgtgagatgttgggttaagtcccgcaacgagcgcaacccttgtcattagttgctacgaaagggcactctaatgaaactgccggtgacaaaccggaggaaggtggggatgacgtcaagtcctcatggcccttatgggtagggcttcacacgtcatacaatggtgcatacagagggttgccaacccgagagggggagctaatctcagaaagtgcatcgtagtccggattgaagtctgcaactcgacttcatgaagttggaatcgctagtaatcgcggatcagcatgtcgcggtgaatacgttcccgggtcttgtacacaccgcccgtcacaccatgggagcgggttttaccagaagtaggtagcttaaccgtaaggagggcgct

SEQ ID NO: 290 - DNA, 1381 bp, Unknown
  Description of Unknown: Lachnospiraceae sp. FBI00290 sequence
  modified_base (4)..(7): a, c, t, g, unknown or other
  modified_base (25)..(26): a, c, t, g, unknown or other
  modified_base (28)..(28): a, c, t, g, unknown or other
  modified_base (31)..(31): a, c, t, g, unknown or other
  modified_base (49)..(50): a, c, t, g, unknown or other
ttannnntgcagtcgaacgaagacnntnctngagtgcttgcacttggannggactgagtggcggacgggtgagtaacgcgtgggtaacctgccttatacagggggataacagttggaaacgactgctaataccgcataagcgcacggtatcgcatgatacagtgtgaaaaactccggtggtataagatggacccgcgtctgattagcttgttggtgaggtaacggcccaccaaggcgacgatcagtagccggcctgagagggtgaacggccacattgggactgagacacggcccaaactcctacgggaggcagcagtggggaatattgcacaatgggggaaaccctgatgcagcgacgccgcgtgagtgatgaagtatttcggtatgtaaaactctatcagcagggaagataatgacggtacctgactaagaagcaccggctaaatacgtgccagcagccgcggtaatacgtatggtgcaagcgttatccggatttactgggtgtaaagggtgcgtaggtggtatggcaagtcagaagtgaaaggctggggctcaacccccgggactgcttttgaaactgtcaaactagagtacaggagaggaaaagcggaattcctagtgtagcggtgaaatgcgtagatattaggaggaacaccagtggcgaaggcggctttctggactgaaactgacactgaggcacgaaagcgtggggagcaaacaggattagataccctggtagtccacgccgtaaacgatgaatactaggtgtcgggcagcatagctgttcggtgccgcagcaaacgcattaagtattccacctggggagtacgttcgcaagaatgaaactcaaaggaattgacggggacccgcacaagcggtggagcatgtggtttaattcgaagcaacgcgaagaaccttaccaggtcttgacatcccgatgaccgcttcttaatcgaaacttttcttcggaacatcggtgacaggtggtgcatggttgtcgtcagctcgtgtcgtgagatgttgggttaagtcccgcaacgagcgcaacccctattttcagtagccagcattttggatgggcactctggagagactgcccgggataaccgggaggaaggtggggatgacgtcaaatcatcatgccccttatgatctgggctacacacgtgctacaatggctgttacagagagaagcgaatccgcgaggaagagcaaacctcaaaaaggcagtctcagttcggattgtagtctgcaactcgactacatgaagctggaatcgctagtaatcgcgaatcagaatgtcgcggtgaatacgttcccgggtcttgtacacaccgcccgtcacaccatgggagttggaaatgcccgaagtcagtgaccc

SEQ ID NO: 291 - DNA, 1197 bp, Oribacterium sp.
  modified_base (1)..(17): a, c, t, g, unknown or other
  modified_base (27)..(27): a, c, t, g, unknown or other
  modified_base (47)..(48): a, c, t, g, unknown or other
  modified_base (50)..(51): a, c, t, g, unknown or other
  modified_base (775)..(775): a, c, t, g, unknown or other
  modified_base (968)..(968): a, c, t, g, unknown or other
  modified_base (976)..(977): a, c, t, g, unknown or other
  modified_base (989)..(991): a, c, t, g, unknown or other
  modified_base (1008)..(1008): a, c, t, g, unknown or other
  modified_base (1013)..(1019): a, c, t, g, unknown or other
  modified_base (1031)..(1031): a, c, t, g, unknown or other
  modified_base (1034)..(1034): a, c, t, g, unknown or other
  modified_base (1036)..(1036): a, c, t, g, unknown or other
  modified_base (1040)..(1041): a, c, t, g, unknown or other
  modified_base (1043)..(1045): a, c, t, g, unknown or other
  modified_base (1047)..(1047): a, c, t, g, unknown or other
  modified_base (1055)..(1057): a, c, t, g, unknown or other
  modified_base (1060)..(1060): a, c, t, g, unknown or other
  modified_base (1064)..(1064): a, c, t, g, unknown or other
  modified_base (1071)..(1072): a, c, t, g, unknown or other
  modified_base (1075)..(1076): a, c, t, g, unknown or other
  modified_base (1080)..(1084): a, c, t, g, unknown or other
  modified_base (1087)..(1087): a, c, t, g, unknown or other
  modified_base (1089)..(1089): a, c, t, g, unknown or other
  modified_base (1092)..(1105): a, c, t, g, unknown or other
  modified_base (1108)..(1110): a, c, t, g, unknown or other
  modified_base (1112)..(1113): a, c, t, g, unknown or other
  modified_base (1115)..(1115): a, c, t, g, unknown or other
  modified_base (1117)..(1117): a, c, t, g, unknown or other
  modified_base (1124)..(1126): a, c, t, g, unknown or other
  modified_base (1129)..(1129): a, c, t, g, unknown or other
  modified_base (1131)..(1148): a, c, t, g, unknown or other
  modified_base (1151)..(1158): a, c, t, g, unknown or other
  modified_base (1160)..(1163): a, c, t, g, unknown or other
  modified_base (1165)..(1174): a, c, t, g, unknown or other
  modified_base (1176)..(1178): a, c, t, g, unknown or other
  modified_base (1181)..(1194): a, c, t, g, unknown or other
  modified_base (1196)..(1197): a, c, t, g, unknown or other
nnnnnnnnnnnnnnnnntgcagtcgancgaagtttttctttcgggannanntagtggcggacgggtgagtaacgcgtgggtaacctgccctgtacagggggacaacagctggaaacggctgctaataccgcataagcccttagcactgcatggtgcatagggaaaaggagcaatccggtacaggatggacccgcgtctgattagccagttggcagggtaacggcctaccaaagcgacgatcagtagccgatctgagaggatgtacggccacattgggactgagacacggcccagactcctacgggaggcagcagtggggaatattgcacaatggaggaaactctgatgcagcgacgccgcgtgagtgaagaagtatttcggtatgtaaagctctatcagcagggaagaaaatgacggtacctgactaagaagcaccggctaaatacgtgccagcagccgcggtaatacgtatggtgcaagcgttatccggatttactgggtgtaaagggagcgtaggtggcaaggcaagccagaagtgaaaacccggggctcaaccgcgggattgcttttggaactgtcatgctagagtgcaggaggggtgagcggaattcctagtgtagcggtgaaatgcgtagatattaggaggaacaccggaggcgaaggcggctcactggactgtaactgacactgaggctcgaaagcgtggggagcaaacaggattagataccctggtagtccacgcggtaaacgatgaatactagatgtcgggtagcanagctactcggtgtcgtcgcaaacgcaataagtattccacctggggagtacgttcgcaagaatgaaactcaaaggaattgacggggacccgcacaagcggtggagcatgtggtttaattcgaagcaacgcgaagaaccttacctgctcttgacatcccattcgatagagggtaatgcctctagcccttcggggnatggagannggtggtgcatgnnngtcgtcagctcgtgtcntgagnnnnnnnttaagtcccgcnacnancgcnncnnntngtcagtannngcngtgnagctggnnctnntgannnnnctncnggnnnnnnnnnnnnnnggnnnanntnancatcatnnnctntnnnnnnnnnnnnnnnnnnctnnnnnnnnannnngnnnnnnnnnnannnggnnnnnnnnnnnnnnann

SEQ ID NO: 292 - DNA, 1262 bp, Methanobrevibacter smithii
  modified_base (3)..(5): a, c, t, g, unknown or other
  modified_base (11)..(12): a, c, t, g, unknown or other
  modified_base (1257)..(1257): a, c, t, g, unknown or other
ggnnngggatnnccctgggaactggggataatactggataggcaattattcctgtaatggttttttgtttaaatgttttttcgcctaaggatgggtctgcggccgattaggtagttggttaggtaatggcttaccaagcctttgatcggtacgggttgtgagagcaagagcccggagatggaacctgagacaaggttccaggccctacggggtgcagcaggcgcgaaacctccgcaatgtgagaaatcgcgacggggggatcccaagtgccattcttaacgggatggcttttcattagtgtaaagagcttttggaataagagctgggcaagaccggtgccagccgccgcggtaacaccggcagctctagtggtagcagtttttattgggcctaaagcgtccgtagccggtttaataagtctctggtgaaatcctgcagcttaactgtgggaattgctggagatactattagacttgagatcgggagaggttagaggtactcccagggtagaggtgaaattctgtaatcctgggaggaccgcctgttgcgaaggcgtctgactggaacgattctgacggtgagggacgaaagctaggggcgcgaaccggattagatacccgggtagtcctagctgtaaacgatgcggacttggtgttggggtggctttgagctgtcccagtgccgaagggaagctgttaagtccgccgcctgggaagtacggtcgcaagactgaaacttaaaggaattggcgggggagcaccacaacgcgtggagcctgcggtttaattggattcaacgccggacatctcaccagaggcgacagctgtatgatagccaggttgatgactttgcttgactagctgagaggaggtgcatggccgccgtcagctcgtaccgtgaggcgtcctgttaagtcaggcaacgagcgagacccacgcccttagttaccagcggatccttttggatgccgggcacactaaggggaccgcctatgataaataggaggaaggagtggacgacggtaggtccgtatgccccgaatcctctgggcaacacgcgggctacaatggctgagacaatgggttccgacgccgaaaggcggaggtaatcctctaaacttagtcgtagttcggattgaggactgtaactcgttctcatgaagctggaatgcgtagtaatcgcgtgtcacaatcgcgcggtgaatacgtccctgctccttgcacacaccgcccgtcacgccacccaaaaagggattgngatga

SEQ ID NO: 293 - DNA, 1373 bp, Bifidobacterium adolescentis
  modified_base (129)..(129): a, c, t, g, unknown or other
tgcagtcgaacgggatcccaggagcttgctcctgggtgagagtggcgaacgggtgagtaatgcgtgaccgacctgccccatacaccggaatagctcctggaaacgggtggtaatgccggatgctccgantggatgcatgtcctgccgggaaagattcatcggtatgggatggggtcgcgtcctatcagcttgatggcggggtaacggcccaccatggcttcgacgggtagccggcctgagagggcgaccggccacattgggactgagatacggcccagactcctacgggaggcagcagtggggaatattgcacaatgggcgcaagcctgatgcagcgacgccgcgtgcgggatgacggccttcgggttgtaaaccgcttttgactgggagcaagcccttcggggtgagtgtacctttcgaataagcaccggctaactacgtgccagcagccgcggtaatacgtagggtgcaagcgttatccggaattattgggcgtaaagggctcgtaggcggttcgtcgcgtccggtgtgaaagtccatcgcttaacggtggatccgcgccgggtacgggcgggcttgagtgcggtaggggagactggaattcccggtgtaacggtggaatgtgtagatatcgggaagaacaccaatggcgaaggcaggtctctgggccgtcactgacgctgaggagcgaaagcgtggggagcgaacaggattagataccctggtagtccacgccgtaaacggtggatgctggatgtggggaccattccacggtctccgtgtcggagccaacgcgttaagcatcccgcctggggagtacggccgcaaggctaaaactcaaagaaattgacgggggcccgcacaagcggcggagcatgcggattaattcgatgcaacgcgaagaaccttacctgggcttgacatgttcccgacagccccagagatggggcctcccttcggggcgggttcacaggtggtgcatggtcgtcgtcagctcgtgtcgtgagatgttgggttaagtcccgcaacgagcgcaaccctcgccctgtgttgccagcacgtcgtggtgggaactcacgggggaccgccggggtcaactcggaggaaggtggggatgacgtcagatcatcatgccccttacgtccagggcttcacgcatgctacaatggccggtacaacgggatgcgacaccgcgaggtggagcggatcccttaaaaccggtctcagttcggattggagtctgcaacccgactccatgaaggcggagtcgctagtaatcgcggatcagcaacgccgcggtgaatgcgttcccgggccttgtacacaccgcccgtcaagtcatgaaagtgggtagcacccgaagccggtggccc

SEQ ID NO: 294 - DNA, 1380 bp, Bacteroides stercoris
  modified_base (1370)..(1370): a, c, t, g, unknown or other
  modified_base (1376)..(1376): a, c, t, g, unknown or other
gcaagtcgaggggcagcatcatcaaagcttgctttgatggatggcgaccggcgcacgggtgagtaacacgtatccaacctgccgacaacactgggatagcctttcgaaagaaagattaataccggatggcataattattccgcatgggataattattaaagaatttcggttgtcgatggggatgcgttccattaggcagttggcggggtaacggcccaccaaacctacgatggataggggttctgagaggaaggtcccccacattggaactgagacacggtccaaactcctacgggaggcagcagtgaggaatattggtcaatggacgagagtctgaaccagccaagtagcgtgaaggatgactgccctatgggttgtaaacttcttttatacgggaataaagtgagccacgtgtggctttttgtatgtaccgtatgaataaggatcggctaactccgtgccagcagccgcggtaatacggaggatccgagcgttatccggatttattgggtttaaagggagcgtaggcgggttgttaagtcagttgtgaaagtttgcggctcaaccgtaaaattgcagttgatactggcgaccttgagtgcaacagaggtaggcggaattcgtggtgtagcggtgaaatgcttagatatcacgaagaactccgattgcgaaggcagcttactggattgtaactgacgctgatgctcgaaagtgtgggtatcaaacaggattagataccctggtagtccacacagtaaacgatgaatactcgctgttggcgatatacagtcagcggccaagcgaaagcattaagtattccacctggggagtacgccggcaacggtgaaactcaaaggaattgacgggggcccgcacaagcggaggaacatgtggtttaattcgatgatacgcgaggaaccttacccgggcttaaattgcaactgacggaaccggaaacggttctttcttcggacagttgtgaaggtgctgcatggttgtcgtcagctcgtgccgtgaggtgtcggcttaagtgccataacgagcgcaacccttacgggtagttaccatcaggttatgctggggactctacccggactgccgtcgtaagatgtgaggaaggtggggatgacgtcaaatcagcacggcccttacgtccggggctacacacgtgttacaatggggggtacagaaggcagctacacggcgacgtggtgctaatcccaaaagcctctctcagttcggattggagtctgcaacccgactccatgaagctggattcgctagtaatcgcgcatcagccacggcgcggtgaatacgttcccgggccttgtacacaccgcccgtcaagccatgaaagccgggggtacctnaagtangtaa

SEQ ID NO: 295 - DNA, 1376 bp, Bifidobacterium adolescentis
  modified_base (130)..(130): a, c, t, g, unknown or other
  modified_base (279)..(279): a, c, t, g, unknown or other
tgcaagtcgaacgggatcccaggagcttgctcctgggtgagagtggcgaacgggtgagtaatgcgtgaccgacctgccccatacaccggaatagctcctggaaacgggtggtaatgccggatgctccgantggatgcatgtcctgccgggaaagattcatcggtatgggatggggtcgcgtcctatcagcttgatggcggggtaacggcccaccatggcttcgacgggtagccggcctgagagggcgaccggccacattgggactgaaatacggcccanactcctacgggaggcagcagtggggaatattgcacaatgggcgcaagcctgatgcagcgacgccgcgtgcgggatgacggccttcgggttgtaaaccgcttttgactgggagcaagcccttcggggtgagtgtacctttcgaataagcaccggctaactacgtgccagcagccgcggtaatacgtagggtgcaagcgttatccggaattattgggcgtaaagggctcgtaggcggttcgtcgcgtccggtgtgaaagtcccatcgcttaacggtggatccgcgccgggtacgggcgggcttgagtgcggtaggggagactggaattcccggtgtaacggtggaatgtgtagatatcgggaagaacaccaatggcgaaggcaggtctctgggccgtcactgacgctgaggagcgaaagcgtggggagcgaacaggattagataccctggtagtccacgcccgtaaacggtggatgctggatgtggggaccattccacggtctccgtgtcggagccaacgcgttaagcatcccgcctgggggagtacggccgcaaggctaaaactcaaagaaattgacgggggcccgcacaagcggcggagcatgcggattaattcgatgcaacgcgaagaaccttacctgggcttgacatgttcccgacagccccagagatggggcctcccttcggggcgggttcacaggtggtgcatggtcgtcgtcagctcgtgtcgtgagatgttgggttaagtcccgcaacgagcgcaaccctcgccctgtgttgccagcacgtcgtggtgggaactcacgggggaccgccggggtcaactcggaggaaggtggggatgacgtcagatcatcatgccccttacgtccagggcttcacgcatgctacaatggccggtacaacgggatgcgacaccgcgaggtggagcggatcccttaaaaccggtctcagttcggattggagtctgcaacccgactccatgaaggcggagtcgctagtaatcgcggatcagcaacgccgcggtgaatgcgttcccgggccttgtacacaccgcccgtcaagtcatgaaagtgggtagcacccgaagccggtggcc

SEQ ID NO: 296 - DNA, 1380 bp, Dorea longicatena
  modified_base (2)..(3): a, c, t, g, unknown or other
  modified_base (9)..(9): a, c, t, g, unknown or other
  modified_base (56)..(56): a, c, t, g, unknown or other
  modified_base (63)..(64): a, c, t, g, unknown or other
  modified_base (126)..(127): a, c, t, g, unknown or other
cnnggctcngagtttgatcctggctcagagtttgatcctggctcagagtttgatcntggctcnnagtttgatcatggctcgagtttgatccggctcatgagtttggacctggctagaaatgactgnnaataccgcagaagaccccgggaccgcagggtacagtggtaaaaactccggtggtatgagatggacccgcgtctgattaggtagttggtggggtaacggcctaccaagccgacgatcagtagccgacctgagagggtgaccggccacattgggactgagacacggcccagactcctacgggaggcagcagtggggaatattgcacaatggaggaaactctgatgcagcgacgccgcgtgaaggatgaagtatttcggtatgtaaacttctatcagcagggaagaaaatgacggtacctgactaagaagccccggctaactacgtgccagcagccgcggtaatacgtagggggcaagcgttatccggatttactgggtgtaaagggagcgtagacggcacggcaagccagatgtgaaagcccggggctcaaccccgggactgcatttggaactgctgagctagagtgtcggagaggcaagtggaattcctagtgtagcggtgaaatgcgtagatattaggaggaacaccagtggcgaaggcggcttgctggacgatgactgacgttgaggctcgaaagcgtggggagcaaacaggattagataccctggtagtccacgccgtaaacgatgactgctaggtgtcgggtggcaaagccattcggtgccgcagctaacgcaataagcagtccacctggggagtacgttcgcaagaatgaaactcaaaggaattgacggggacccgcacaagcggtggagcatgtggtttaattcgaagcaacgcgaagaaccttacctgatcttgacatcccgatgaccgcttcgtaatggaagtttttcttcggaacatcggtgacaggtggtgcatggttgtcgtcagctcgtgtcgtgagatgttgggttaagtcccgcaacgagcgcaacccctatcttcagtagccagcaggttaagctgggcactctggagagactgccagggataacctggaggaaggtggggatgacgtcaaatcatcatgccccttatgaccagggctacacacgtgctacaatggcgtaaacaaagagaagcaaactcgcgagggtaagcaaatctcaaaaataacgtctcagttcggattgtagtctgcaactcgactacatgaagctggaatcgctagtaatcgcagatcagaatgctgcggtgaatacgttcccgggtcttgtacacaccgcccgtcacaccatgggagtcagtaacgcccgaagtcagtgaccc

SEQ ID NO: 297 - DNA, 1406 bp, Alistipes obesi
  modified_base (21)..(21): a, c, t, g, unknown or other
  modified_base (27)..(27): a, c, t, g, unknown or other
  modified_base (278)..(279): a, c, t, g, unknown or other
  modified_base (286)..(287): a, c, t, g, unknown or other
tgcagtcgaggggcagcatantggtancaatactattgatggcgaccggcggacgggtgcgtaacgcgtatgcaacctaccctttacagggggataacactgagaaatcggtactaataccccataatattctgggaggcatctttcggagttgaaagctttggtggtaaaggatgggcatgcgttgtattagctagttggtaaggtaacggcttaccaaggcgacgatacatagggggactgagaggttaaccccccacattggtactgagacacgnnccaaacnnctacgggaggcagcagtgaggaatattggtcaatggacggaagtctgaaccagccatgccgcgtgcaggaagacggctctatgagttgtaaactgcttttgtacgagggtaaacgcagatacgtgtatctgcctgaaagtatcgtacgaataaggatcggctaactccgtgccagcagccgcggtaatacggaggatccaagcgttatccggatttattgggtttaaagggtgcgtaggcggtttagtaagtcagcggtgaaattttggtgcttaacaccaaacgtgccgttgatactgctgggctagagagtagttgcggtaggcggaatgtatggtgtagcggtgaaatgcttagagatcatacagaacaccgattgcgaaggcagcttaccaaactatatctgacgttgaggcacgaaagcgtggggagcaaacaggattagataccctggtagtccacgcagtaaacgatgatagctcgttgtcggcgatacacagtcggtgactaagagaaatcgataagctatccacctggggagtacgttcgcaagaatgaaactcaaaggaattgacgggggcccgcacaagcggaggaacatgtggtttaattcgatgatacgcgaggaaccttacccgggcttgaaagttactgacgattctggaaacaggatttcccttcggggcaggaaactaggtgctgcatggttgtcgtcagctcgtgccgtgaggtgtcgggttaagtcccataacgagcgcaacccctactgatagttgccatcagagcgtttgagcgatcaaacaagctgggcactctatcgggactgccggtgtaagccgagaggaaggtggggatgacgtcaaatcagcacggcccttacgtccggggcgacacacgtgttacaatggtaggtacagagggcagccacccagtgatggggagcgaatctcgaaagcctatctcagttcggattggaggctgaaactcgcctccatgaagttggattcgctagtaatcgcgcatcagccatggcgcggtgaatacgttcccgggccttgtacacaccgcccgtcaagccatgggagttgggggtgcctgaagttcgtgaccgaaaggagc

SEQ ID NO: 298 - DNA, 1373 bp, Faecalibacterium prausnitzii
  modified_base (132)..(132): a, c, t, g, unknown or other
  modified_base (142)..(142): a, c, t, g, unknown or other
  modified_base (1361)..(1361): a, c, t, g, unknown or other
tgcagtcgaacgagcgagagagagcttgctttctcgagcgagtggcgaacgggtgagtaacgcgtgaggaacctgcctcaaagagggggacaacagttggaaacgactgctaataccgcataagcccacggngccgcatcgnacagagggaaaaggagtaatccgctttgagatggcctcgcgtccgattagctagttggtgaggtaacggcccaccaaggcgacgatcggtagccggactgagaggttgaacggccacattgggactgagacacggcccagactcctacgggaggcagcagtggggaatattgcacaatgggggaaaccctgatgcagcgacgccgcgtggaggaagaaggtcttcggattgtaaactcctgttgttggggaagataatgacggtacccaacaaggaagtgacggctaactacgtgccagcagccgcggtaaaacgtaggtcacaagcgttgtccggaattactgggtgtaaagggagcgcaggcgggaagacaagttggaagtgaaatctatgggctcaacccataaactgctttcaaaactgtttttcttgagtagtgcagaggtaggcggaattcccggtgtagcggtggaatgcgtagatatcgggaggaacaccagtggcgaaggcggcctactgggcaccaactgacgctgaggctcgaaagtgtgggtagcaaacaggattagataccctggtagtccacaccgtaaacgatgattactaggtgttggaggattgaccccttcagtgccgcagttaacacaataagtaatccacctggggagtacgaccgcaaggttgaaactcaaaggaattgacgggggcccgcacaagcagtggagtatgtggtttaattcgacgcaacgcgaagaaccttaccaagtcttgacatcccttgacaggcatagaaatatgttatctcttcggagcaaggagacaggtggtgcatggttgtcgtcagctcgtgtcgtgagatgttgggttaagtcccgcaacgagcgcaacccttatggtcagttactacgcaagaggactctggccagactgccgttgacaaaacggaggaaggtggggatgacgtcaaatcatcatgccctttatgacttgggctacacacgtactacaatggcgttaaacaaagagaagcaagaccgcgaggtggagcaaaactcagaaacaacgtcccagttcggactgcaggctgcaactcgcctgcacgaagtcggaattgctagtaatcgtggatcagcatgccacggtgaatacgttcccgggccttgtacacaccgcccgtcacaccatgagagccggggggacccgaagtcggtagtctaancgcaaggaggac

SEQ ID NO: 299 - DNA, 1368 bp, Streptococcus pasteurianus
gctagagtagaaggagttgcgaacgggtgagtaacgcgtaggtaacctgcctactagcgggggataactattggaaacgatagctaataccgcataacagtgtttaacacatgttagatgcttgaaagatgcaattgcatcactagtagatggacctgcgttgtattagctagttggtggggtaacggcccaccaaggcgacgatacatagccgacctgagagggtgatcggccacactgggactgagacacggcccagactcctacgggaggcagcagtagggaatcttcggcaatgggggcaaccctgaccgagcaacgccgcgtgagtgaagaaggttttcggatcgtaaagctctgttgtaagagaagaacgtgtgtgagagtggaaagttcacacagtgacggtaacttaccagaaagggacggctaactacgtgccagcagccgcggtaatacgtaggtcccgagcgttgtccggatttattgggcgtaaagcgagcgcaggcggtttaataagtctgaagttaaaggcagtggcttaaccattgttcgctttggaaactgttaaacttgagtgcagaaggggagagtggaattccatgtgtagcggtgaaatgcgtagatatatggaggaacaccggtggcgaaagcggctctctggtctgtaactgacgctgaggctcgaaagcgtggggagcaaacaggattagataccctggtagtccacgccgtaaacgatgagtgctaggtgttaggccctttccggggcttagtgccgcagctaacgcattaagcactccgcctggggagtacgaccgcaaggttgaaactcaaaggaattgacgggggcccgcacaagcggtggagcatgtggtttaattcgaagcaacgcgaagaaccttaccaggtcttgacatcccgatgctatttctagagatagaaagtttcttcggaacatcggtgacaggtggtgcatggttgtcgtcagctcgtgtcgtgagatgttgggttaagtcccgcaacgagcgcaacccctattgttagttgccatcatttagttgggcactctagcgagactgccggtaataaaccggaggaaggtggggatgacgtcaaatcatcatgccccttatgacctgggctacacacgtgctacaatggttggtacaacgagtcgcaagtcggtgacggcaagcaaatctcttaaagccaatctcagttcggattgtaggctgcaactcgcctacatgaagtcggaatcgctagtaatcgcggatcagcacgccgcggtgaatacgttcccgggccttgtacacaccgcccgtcacaccacgagagtttgtaacacccgaagtcggtgaggta

SEQ ID NO: 300 - DNA, 1371 bp, Collinsella aerofaciens
  modified_base (8)..(11): a, c, t, g, unknown or other
  modified_base (1356)..(1356): a, c, t, g, unknown or other
tgcagtcnnnngcacctatcttcggatagaagcgagtggcgaacggctgagtaacacgtggagaacctgccccctcccccgggatagccgcccgaaaggacgggtaataccggataccccggggtgccgcatggcgccccggctaaagccccgacgggaggggatggctccgcggcccatcaggtagacggcggggtgacggcccaccgtgccgacaacgggtagccgggttgagagaccgaccggccagattgggactgagacacggcccagactcctacgggaggcagcagtggggaatcttgcgcaatggggggaaccctgacgcagcgacgccgcgtgcgggacggaggccttcgggtcgtaaaccgctttcagcagggaagagtcaagactgtacctgcagaagaagccccggctaactacgtgccagcagccgcggtaatacgtagggggcgagcgttatccggattcattgggcgtaaagcgcgcgtaggcggcccggcaggccgggggtcgaagcggggggctcaaccccccgaagcccccggaacctccgcggcttgggtccggtaggggagggtggaacacccggtgtagcggtggaatgcgcagatatcgggtggaacaccggtggcgaaggcggccctctgggccgagaccgacgctgaggcgcgaaagctgggggagcgaacaggattagataccctggtagtcccagccgtaaacgatggacgctaggtgtggggggacgatccccccgtgccgcagccaacgcattaagcgtcccgcctggggagtacggccgcaaggctaaaactcaaaggaattgacgggggcccgcacaagcagcggagcatgtggcttaattcgaagcaacgcgaagaaccttaccagggcttgacatatgggtgaagcggggggagaccccgtggccgagaggagcccatacaggtggtgcatggctgtcgtcagctcgtgtcgtgagatgttgggttaagtcccgcaacgagcgcaacccccgccgcgtgttgccatcgggtgatgccgggaacccacgcgggaccgccgccgtcaaggcggaggagggcggggacgacgtcaagtcatcatgccccttatgccctgggctgcacacgtgctacaatggccggtacagagggatgccaccccgcgagggggagcggatcccggaaagccggccccagttcggattgggggctgcaacccgcccccatgaagtcggagttgctagtaatcgcggatcagcatgccgcggtgaatgcgttcccgggccttgtacacaccgcccgtcacaccacccgagtcgtctgcacccgaagtcgccggcccaancgagaggggggaggc

SEQ ID NO: 301 - DNA, 1394 bp, Bifidobacterium adolescentis
  modified_base (2)..(2): a, c, t, g, unknown or other
  modified_base (131)..(131): a, c, t, g, unknown or other
  modified_base (280)..(280): a, c, t, g, unknown or other
  modified_base (1377)..(1377): a, c, t, g, unknown or other
  modified_base (1383)..(1383): a, c, t, g, unknown or other
cntgcagtcgaacgggatcccaggagcttgctcctgggtgagagtggcgaacgggtgagtaatgcgtgaccgacctgccccatacaccggaatagctcctggaaacgggtggtaatgccggatgctccgantggatgcatgtccttccgggaaagattcatcggtatgggatggggtcgcgtcctatcagcttgatggcggggtaacggcccaccatggcttcgacgggtagccggcctgagagggcgaccggccacattgggactgagatacggcccanactcctacgggaggcagcagtggggaatattgcacaatgggcgcaagcctgatgcagcgacgccgcgtgcgggatgacggccttcgggttgtaaaccgcttttgactgggagcaagcccttcggggtgagtgtacctttcgaataagcaccggctaactacgtgccagcagccgcggtaatacgtagggtgcaagcgttatccggaattattgggcgtaaagggctcgtaggcggttcgtcgcgtccggtgtgaaagtccatcgcttaacggtggatccgcgccgggtacgggcgggcttgagtgcggtaggggagactggaattcccggtgtaacggtggaatgtgtagatatcgggaagaacaccaatggcgaaggcaggtctctgggccgtcactgacgctgaggagcgaaagcgtggggagcgaacaggattagataccctggtagtccacgccgtaaacggtggatgctggatgtggggaccattccacggtctccgtgtcggagccaacgcgttaagcatcccgcctggggagtacggccgcaaggctaaaactcaaagaaattgacgggggcccgcacaagcggcggagcatgcggattaattcgatgcaacgcgaagaaccttacctgggcttgacatgttcccgacagccccagagatggggcctcccttcggggcgggttcacaggtggtgcatggtcgtcgtcagctcgtgtcgtgagatgttgggttaagtcccgcaacgagcgcaaccctcgccctgtgttgccagcacgtcgtggtgggaactcacgggggaccgccggggtcaactcggaggaaggtggggatgacgtcagatcatcatgccccttacgtccagggcttcacgcatgctacaatggccggtacaacgggatgcgacaccgcgaggtggagcggatcccttaaaaccggtctcagttcggattggagtctgcaacccgactccatgaaggcggagtcgctagtaatcgcggatcagcaacgccgcggtgaatgcgttcccgggccttgtacacaccgcccgtcaagtcatgaaagtgggtagcacccgaagccggtggcccancctttntggggggagcc

SEQ ID NO: 302 - DNA, 1389 bp, Blautia faecis
  modified_base (16)..(18): a, c, t, g, unknown or other
  modified_base (1386)..(1387): a, c, t, g, unknown or other
tgcagtcgaacgggannnctttattgaaacttcggtggatttaatttatttctagtggcggacgggtgagtaacgcgtgggtaacctgccttatactgggggataacagccagaaatgactgctaataccgcataagcgcacagaaccgcatggttcggtgtgaaaaactccggtggtataagatggacccgcgttggattagctagttggcagggcagcggcctaccaaggcgacgatccatagccggcctgagagggtgaacggccacattgggactgagacacggcccagactcctacgggaggcagcagtggggaatattgcacaatgggggaaaccctgatgcagcgacgccgcgtgaaggaagaagtatctcggtatgtaaacttctatcagcagggaagataatgacggtacctgactaagaagccccggctaactacgtgccagcagccgcggtaatacgtagggggcaagcgttatccggatttactgggtgtaaagggagcgtagacggcgcagcaagtctgatgtgaaaggcaggggcttaacccctggactgcattggaaactgctgtgcttgagtgccggaggggtaagcggaattcctagtgtagcggtgaaatgcgtagatattaggaggaacaccagtggcgaaggcggcttactggacggtaactgacgttgaggctcgaaagcgtggggagcaaacaggattagataccctggtagtccacgccgtaaacgatgaatactaggtgtcagggagcacagctcttaggtgccgccgcaaacgcattaagtattccacctggggagtacgttcgcaagaatgaaactcaaaggaattgacggggacccgcacaagcggtggagcatgtggtttaattcgaagcaacgcgaagaaccttaccaaatcttgacatccctctgaccgggacttaaccgtccctttccttcgggacaggggagacaggtggtgcatggttgtcgtcagctcgtgtcgtgagatgttgggttaagtcccgcaacgagcgcaacccctatccttagtagccagcatgtaaaggtgggcactctgaggagactgccagggataacctggaggaaggcggggatgacgtcaaatcatcatgccccttatgatttgggctacacacgtgctacaatggcgtaaacaaagggaagcgaacccgcgagggtgggcaaatctcaaaaataacgtcccagttcggactgcagtctgcaactcgactgcacgaagctggaatcgctagtaatcgcggatcagaatgccgcggtgaatacgttcccgggtcttgtacacaccgcccgtcacaccatgggagtcagtaacgcccgaagtcagtgacctaaccgcaannga

SEQ ID NO: 303 - DNA, 1398 bp, Parabacteroides merdae
  modified_base (18)..(18): a, c, t, g, unknown or other
  modified_base (28)..(28): a, c, t, g, unknown or other
  modified_base (31)..(31): a, c, t, g, unknown or other
  modified_base (36)..(36): a, c, t, g, unknown or other
  modified_base (38)..(39): a, c, t, g, unknown or other
  modified_base (231)..(231): a, c, t, g, unknown or other
  modified_base (1393)..(1394): a, c, t, g, unknown or other
  modified_base (1396)..(1396): a, c, t, g, unknown or other
tgcagtcgaggggcagcntgatttgtancgntacananngatggcgaccggcgcacgggtgagtaacgcgtatgcaacttacctatcagagggggatagcccggcgaaaggcggattaataccccataaaacaggggtcccgcatgggaatatttgttaaagattcatcgctgatagataggcatgcgttccatgaggcagttggcggggtaacggcccaccaaaccgacnatggataggggttctgagaggaaggtcccccacattggtactgagacacggaccaaactcaaacgggaggcagcagtgaggaatattggtcaatggccgagaggctgaaccagccaagtcgcgtgaaggaagaaggatctatggtttgtaaacttcttttataggggaataaagtggaggacgtgtccttttttgtatgtaccctatgaataagcatcggctaactccgtgccagcagccgcggtaatacggaggatgcgagcgttatccggatttattgggtttaaagggtgcgtaggtggtgatttaagtcagcggtgaaagtttgtggctcaaccataaaattgccgttgaaactgggttacttgagtgtgtttgaggtaggcggaatgcgtggtgtagcggtgaaatgcatagatatcacgcagaactccgattgcgaaggcagcttactaaaccataactgacactgaagcacgaaagcgtggggatcaaacaggattagataccctggtagtccacgcagtaaacgatgattactaggagtttgcgatacaatgtaagctctacagcgaaagcgttaagtaatccacctggggagtacgccggcaacggtgaaactcaaaggaattgacgggggcccgcacaagcggaggaacatgtggtttaattcgatgatacgcgaggaaccttacccgggtttgaacgtagtttgaccggagtggaaacactctttctagcaatagcaaattacgaggtgctgcatggttgtcgtcagctcgtgccgtgaggtgtcggcttaagtgccataacgagcgcaacccttatcactagttactaacaggtgaagctgaggactctggtgagactgccagcgtaagctgtgaggaaggtggggatgacgtcaaatcagcacggcccttacatccggggcgacacacgtgttacaatggcatggacaaagggcagctacctggtgacaggatgctaatctccaaaccatgtctcagttcggatcggagtctgcaactcgactccgtgaagctggattcgctagtaatcgcgcatcagccatggcgcggtgaatacgttcccgggccttgtacacaccgcccgtcaagccatgggagccgggggtacctgaagtccgtaaccgcaaggnncngc

SEQ ID NO: 304 - DNA, 1397 bp, Dorea longicatena
  modified_base (24)..(24): a, c, t, g, unknown or other
tgcagtcgagcgaagcactttggnaagattcttcggatgatttcctttgtgactgagcggcggacgggtgagtaacgcgtgggtaacctgcctcatacagggggataacagttagaaatgactgctaataccgcataagaccacggtaccgcatggtacagtggtaaaaactccggtggtatgagatggacccgcgtctgattaggtagttggtggggtaacggcctaccaagccgacgatcagtagccgacctgagagggtgaccggccacattgggactgagacacggcccagactcctacgggaggcagcagtggggaatattgcacaatggaggaaactctgatgcagcgacgccgcgtgaaggatgaagtatttcggtatgtaaacttctatcagcagggaagaaaatgacggtacctgactaagaagccccggctaactacgtgccagcagccgcggtaatacgtagggggcaagcgttatccggatttactgggtgtaaagggagcgtagacggcacggcaagccagatgtgaaagcccggggctcaaccccgggactgcatttggaactgctgagctagagtgtcggagaggcaagtggaattcctagtgtagcggtgaaatgcgtagatattaggaggaacaccagtggcgaaggcggcttgctggacgatgactgacgttgaggctcgaaagcgtggggagcaaacaggattagataccctggtagtccacgccgtaaacgatgactgctaggtgtcgggtggcaaagccattcggtgccgcagctaacgcaataagcagtccacctgggggagtacgttcgcaagaatgaaactcaaaggaattgacggggacccgcacaagcggtggagcatgtggtttaattcgaagcaacgcgaagaaccttacctgatcttgacatcccgatgaccgcttcgtaatggaagtttttcttcggaacatcggtgacaggtggtgcatggttgtcgtcagctcgtgtcgtgagatgttgggttaagtcccgcaacgagcgcaacccctatcttcagtagccagcaggttaagctgggcactctggagagactgccagggataacctggaggaaggtggggatgacgtcaaatcatcatgccccttatgaccagggctacacacgtgctacaatggcgtaaacaaagagaagcgaactcgcgagggtaagcaaatctcaaaaataacgtctcagttcggattgtagtctgcaactcgactacatgaagctggaatcgctagtaatcgcagatcagaatgctgcggtgaatacgttcccgggtcttgtacacaccgcccgtcacaccatgggagtcagtaacgcccgaagtcagtgacccaaccgtaaggagggagc

SEQ ID NO: 305 - DNA, 1390 bp, Alistipes onderdonkii
  modified_base (3)..(4): a, c, t, g, unknown or other
  modified_base (283)..(283): a, c, t, g, unknown or other
tgnngtcgaggggcatcacgaggtagcaatactttggtggcgaccggcgcacgggtgcgtaacgcgtatgtaacctacctataacaggggcataacactgagaaattggtactaattccccataatattcggagaggcatctctccgggttgaaaactccggtggttatagatggacatgcgttgtattagctagttggtgaggtaacggctcaccaaggcaacgatacatagggggactgagaggttaaccccccacactggtactgagacacggaccagantcctacgggaggcagcagtgaggaatattggtcaatggacgcaagtctgaaccagccatgccgcgtgcaggaagacggctctatgagttgtaaactgcttttgtacgagggtaaactcacctacgtgtaggtgactgaaagtatcgtacgaataaggatcggctaactccgtgccagcagccgcggtaatacggaggattcaagcgttatccggatttattgggtttaaagggtgcgtaggcggtttgataagttagaggtgaaatcccggggcttaactccggaactgcctctaatactgttagactagagagtagttgcggtaggcggaatgtatggtgtagcggtgaaatgcttagagatcatacagaacaccgattgcgaaggcagcttaccaaactatatctgacgttgaggcacgaaagcgtggggagcaaacaggattagataccctggtagtccacgcagtaaacgatgataactcgttgtcggcgatacacagtcggtgactaagcgaaagcgataagttatccacctggggagtacgttcgcaagaatgaaactcaaaggaattgacgggggcccgcacaagcggaggaacatgtggtttaattcgatgatacgcgaggaaccttacccgggcttgaaagttactgacgattctggaaacaggatttccctttggggcaggaaactaggtgctgcatggttgtcgtcagctcgtgccgtgaggtgtcgggttaagtcccataacgagcgcaacccctaccgttagttgccatcaggtcaagctgggcactctggcgggactgccggtgtaagccgagaggaaggtggggatgacgtcaaatcagcacggcccttacgtccggggctacacacgtgttacaatggtaggtacagagggtcgctaccccgcgaggggatgccaatctcgaaagcctatctcagttcggattggaggctgaaacccgcctccatgaagttggattcgctagtaatcgcgcatcagccatggcgcggtgaatacgttcccgggccttgtacacaccgcccgtcaagccatggaagctgggggtgcctgaagttcgtgaccgcaaggagcga

SEQ ID NO: 306 - DNA, 1362 bp, Parasutterella excrementihominis
aggagcttgctccaccccgacgacgagtggcgaacgggtgagtaatacatcggaacgtgtccgctcgtgggggacaaccagccgaaaggttggctaataccgcatgagttctacggaagaaagagggggacccgcaagggcctctcgcgagcggagcggccgatgactgattagccggttggtgaggtaacggctcaccaaagcaacgatcagtagctggtctgagaggacgaccagccacactgggactgagacacggcccagactcctacgggaggcagcagtggggaattttggacaatgggcgcaagcctgatccagctattccgcgtgtgggatgaaggccctcgggttgtaaaccacttttgtagagaacgaaaagacatcttcgaataaaggatgttgctgacggtactctaagaataagcaccggctaactacgtgccagcagccgcggtaatacgtagggtgcgagcgttaatcggaattactgggcgtaaagggtgcgcaggcggttgagtaagacagatgtgaaatccccgagcttaactcgggaatggcatatgtgactgctcgactagagtgtgtcagagggaggtggaattccacgtgtagcagtgaaatgcgtagatatgtggaagaacaccgatggcgaaggcagcctcctgggacataactgacgctcaggcacgaaagcgtggggagcaaacaggattagataccctggtagtccacgccctaaacgatgttaactagttgttgggatgtaacaatctcagtaacgcagccaacgcgagaagttaaccgcctgggaagtacggtcgcaagactaaaactcaaaggaattgacggggacccgcacaagcggtggatgatgtggattaattcgatgcaacgcgaaaaaccttacctacccttgacatgtcaggaagcttttgtaatgagagcgtgcccgcaagggagcctgaacacaggtgctgcatggctgtcgtcagcttgtgttgtgagatgttgggttaagtcccgcaacgagcgcaacccttgtcactagttgctacgaaagggcactttagtgagactgccggtgacaaaccggaggaaggtggggatgacgtcaagtcctcatggcccttatgggtagggcttcacacgtcatacaatggtcggaacagagggcagcgaagccgtgaggcggagccaatcccagaaaaccgattgtagtccggattgcagtttgcaacttgactgcatgaagttggaatcgctagtaatcgcggatcagcatgccgcggtgaatacgttcccgggttttgtacacaccgcccgtcaaacaatgggagtggtgtttaccagaagtcgttt

SEQ ID NO: 307 - DNA, 1387 bp, Parasutterella excrementihominis
  modified_base (9)..(9): a, c, t, g, unknown or other
  modified_base (15)..(15): a, c, t, g, unknown or other
  modified_base (19)..(20): a, c, t, g, unknown or other
  modified_base (22)..(23): a, c, t, g, unknown or other
  modified_base (1384)..(1384): a, c, t, g, unknown or other
tgcagtcgnacggtnacgnngnnggaggagcttgctccaccccgacgacgagtggcgaacgggtgagtaatacatcggaacgtgtccgctcgtgggggacaaccagccgaaaggttggctaataccgcatgagttctacggaagaaagagggggacccgcaagggcctctcgcgagcggagcggccgatgactgattagccggttggtgaggtaacggctcaccaaagcaacgatcagtagctggtctgagaggacgaccagccacactgggactgagacacggcccagactcctacgggaggcagcagtggggaattttggacaatgggcgcaagcctgatccagctattccgcgtgtgggatgaaggccctcgggttgtaaaccacttttgtagagaacgaaaagacatcttcgaataaaggatgttgctgacggtactctaagaataagcaccggctaactacgtgccagcagccgcggtaatacgtagggtgcgagcgttaatcggaattactgggcgtaaagggtgcgcaggcggttgagtaagacagatgtgaaatccccgagcttaactcgggaatggcatatgtgactgctcgactagagtgtgtcagagggaggtggaattccacgtgtagcagtgaaatgcgtagatatgtggaagaacaccgatggcgaaggcagcctcctgggacataactgacgctcaggcacgaaagcgtggggagcaaacaggattagataccctggtagtccacgccctaaacgatgttaactagttgttgggatgtaacaatctcagtaacgcagccaacgcgagaagttaaccgcctgggaagtacggtcgcaagactaaaactcaaaggaattgacggggacccgcacaagcggtggatgatgtggattaattcgatgcaacgcgaaaaaccttacctacccttgacatgtcaggaagctcttgtaatgagagcgtgcccgcaagggagcctgaacacaggtgctgcatggctgtcgtcagcttgtgtcgtgagatgttgggttaagtcccgcaacgagcgcaacccttgtcactagttgctacgaaagggcactttagtgagactgccggtgacaaaccggaggaaggtggggatgacgtcaagtcctcatggcccttatgggtagggcttcacacgtcatacaatggtcggaacagagggcagcgaagccgtgaggcggagccaatcccagaaaaccgattgtagtccggattgcagtttgcaaattgactgcatgaagttggaatcgctagtaatcgcggatcagcatgccgcggtgaatacgttcccgggttttgtacacaccgcccgtcaaacaatgggagtggtgtttaccagaagtcnttt

SEQ ID NO: 308 - DNA, 1394 bp, Bacteroides vulgatus
  modified_base (35)..(35): a, c, t, g, unknown or other
  modified_base (37)..(39): a, c, t, g, unknown or other
  modified_base (1393)..(1393): a, c, t, g, unknown or other
tgcagtcgaggggcagcatggtcttagcttgctangnnngatggcgaccggcgcacgggtgagtaacacgtatccaacctgccgtctactcttggacagccttctgaaaggaagattaatacaagatggcatcatgagtccgcatgttcacatgattaaaggtattccggtagacgatggggatgcgttccattagatagtaggcggggtaacggcccacctagtcttcgatggataggggttctgagaggaaggtcccccacattggaactgagacacggtccaaactcctacgggaggcagcagtgaggaatattggtcaatgggcgagagcctgaaccagccaagtagcgtgaaggatgactgccctatgggttgtaaacttcttttataaaggaataaagtcgggtatggatacccgtttgcatgtactttatgaataaggatcggctaactccgtgccagcagccgcggtaatacggaggatccgagcgttatccggatttattgggtttaaagggagcgtagatggatgtttaagtcagttgtgaaagtttgcggctcaaccgtaaaattgcagttgatactggatatcttgagtgcagttgaggcaggcggaattcgtggtgtagcggtgaaatgcttagatatcacgaagaactccgattgcgaaggcagcctgctaagctgcaactgacattgaggctcgaaagtgtgggtatcaaacaggattagataccctggtagtccacacggtaaacgatgaatactcgctgtttgcgatatactgcaagcggccaagcgaaagcgttaagtattccacctggggagtacgccggcaacggtgaaactcaaaggaattgacgggggcccgcacaagcggaggaacatgtggtttaattcgatgatacgcgaggaaccttacccgggcttaaattgcagatgaattacggtgaaagccgtaagccgcaaggcatctgtgaaggtgctgcatggttgtcgtcagctcgtgccgtgaggtgtcggcttaagtgccataacgagcgcaacccttgttgtcagttactaacaggttccgctgaggactctgacaagactgccatcgtaagatgtgaggaaggtggggatgacgtcaaatcagcacggcccttacgtccggggctacacacgtgttacaatggggggtacagagggccgctaccacgcgagtggatgccaatccccaaaacctctctcagttcggactggagtctgcaacccgactccacgaagctggattcgctagtaatcgcgcatcagccacggcgcggtgaatacgttcccgggccttgtacacaccgcccgtcaagccatgggagccgggggtacctgaagtgcgtaaccgcgaggagcnc

SEQ ID NO: 309 - DNA, 1396 bp, Eubacterium rectale
  modified_base (1383)..(1383): a, c, t, g, unknown or other
tgcagtcgaacgaagcactttatttgatttccttcgggactgattattttgtgactgagtggcggacgggtgagtaacgcgtgggtaacctgccttgtacagggggataacagttggaaacggctgctaataccgcataagcgcacagcatcgcatgatgcagtgtgaaaaactccggtggtataagatggacccgcgttggattagctagttggtgaggtaacggcccaccaaggcgacgatccatagccgacctgagagggtgaccggccacattgggactgagacacggcccaaactcctacgggaggcagcagtggggaatattgcacaatgggcgaaagcctgatgcagcgacgccgcgtgagcgaagaagtatttcggtatgtaaagctctatcagcagggaagataatgacggtacctgactaagaagcaccggctaaatacgtgccagcagccgcggtaatacgtatggtgcaagcgttatccggatttactgggtgtaaagggagcgcaggcggtgcggcaagtctgatgtgaaagcccggggctcaaccccggtactgcattggaaactgtcgtactagagtgtcggaggggtaagcggaattcctagtgtagcggtgaaatgcgtagatattaggaggaacaccagtggcgaaggcggcttactggacgataactgacgctgaggctcgaaagcgtggggagcaaacaggattagataccctggtagtccacgccgtaaacgatgaatactaggtgttgggaagcattgcttctcggtgccgtcgcaaacgcagtaagtattccacctggggagtacgttcgcaagaatgaaactcaaaggaattgacggggacccgcacaagcggtggagcatgtggtttaattcgaagcaacgcgaagaaccttaccaagtcttgacatccttctgaccggtacttaatcgtaccttctcttcggagcaggagtgacaggtggtgcatggttgtcgtcagctcgtgtcgtgagatgttgggttaagtcccgcaacgagcgcaacccttatctttagtagccagcggttcggccgggcactctagagagactgccagggataacctggaggaaggcggggatgacgtcaaatcatcatgccccttatgacttgggctacacacgtgctacaatggcgtaaacaaagggaagcaaagctgtgaagccgagcaaatctcaaaaataacgtctcagttcggactgtagtctgcaacccgactacacgaagctggaatcgctagtaatcgcagatcagaatgctgcggtgaatacgttcccgggtcttgtacacaccgcccgtcacaccatgggagttgggaatgcccgaagccagtgacctaancgaaaggaaggag

SEQ ID NO: 310 - DNA, 1389 bp, Butyricimonas faecihominis
  modified_base (1386)..(1387): a, c, t, g, unknown or other
tgcagtcgaggggcagcggggagtagcaatacttcgccggcgaccggcgcacgggtgagtaacacgtgtgcaaccaaccccgtaccgggagataacccgcggaaacgtggactaacatcccataatactggaggatcgcatgatctttcatttaaaattccggtggtacgggacgggcacgcgcgacattaggtagttggcggggtaacggcccaccaagccgacgatgtctaggggttctgagaggaaggtcccccacactggaactgagacacggtccagactcctacgggaggcagcagtgaggaatattggtcaatgggcgagagcctgaaccagccaagtcgcgtgagggaagaatggtccatggcctgtaaacctcttttgtcaaggaagaataaattgcacgtgtgctatcttgccagtacttgacgaataagcatcggctaactccgtgccagcagccgcggtaatacgggggatgcgagcgttatccggatttattgggtttaaagggcgcgtaggcgggacgccaagtcagcggtaaaagactgcagctaaactgtagcacgccgttgaaactggcgccctcgagacgagacgagggaggcggaacaagtgaagtagcggtgaaatgcttagatatcacttggaaccccgatagcgaaggcagcttcccaggctcgatctgacgctgatgcgcgagagcgtgggtagcgaacaggattagataccctggtagtccacgccgtaaacgatgctcactggatcttggcgatacactgccagggttcaagcgaaagtattaagtgagccacctggggagtacgtcggcaacgatgaaactcaaaggaattgacgggggcccgcacaagcggaggaacatgtggtttaattcgatgatacgcgaggaaccttacccgggtttaaatgtattttgcatttcttggaaacaggaattcccttcggggctagatacaaggtgctgcatgggttgtcgtcagctcgtgccgtgaggtgtcgggttaagtcccataacgagcgcaacccctatcgccagttgccatcggttgaagccgggcactctgtcgagactgccaccgtaaggtgcgaggaaggcggggatgacgtcaaatcagcacggcccttacacccggggcgacacacgtgttacaatggccggtacagagggcagccacggggtgacccggagcgaatctctaaagccggtcgtagttcggactggagtctgcaacccgactccacgaagttggattcgctagtaatcgcgcatcagccatggcgcggtgaatacgttcccgggccttgtacacaccgcccgtcaagccatggaagccgggagtacctgaagatcgtgaccgcgannaa

SEQ ID NO: 311 - DNA, 1395 bp, Anaerostipes hadrus
  modified_base (16)..(17): a, c, t, g, unknown or other
  modified_base (23)..(23): a, c, t, g, unknown or other
  modified_base (39)..(39): a, c, t, g, unknown or other
  modified_base (43)..(43): a, c, t, g, unknown or other
  modified_base (51)..(51): a, c, t, g, unknown or other
  modified_base (54)..(55): a, c, t, g, unknown or other
  modified_base (91)..(91): a, c, t, g, unknown or other
tgcagtcgaacgaacnncttatntgattttcttcggaantgangatttggnganngagtggcggacgggtgagtaacgcgtgggtaacctnccctgtacagggggataacagtcagaaatgactgctaataccgcataagaccacagcaccgcatggtgcaggggtaaaaactccggtggtacaggatggacccgcgtctgattagctggttggtgaggtaacggctcaccaaggcgacgatcagtagccggcttgagagagtgaacggccacattgggactgagacacggcccaaactcctacgggaggcagcagtggggaatattgcacaatgggggaaaccctgatgcagcgacgccgcgtgagtgaagaagtatctcggtatgtaaagctctatcagcagggaagaaaatgacggtacctgactaagaagccccggctaactacgtgccagcagccgcggtaatacgtagggggcaagcgttatccggaattactgggtgtaaagggtgcgtaggtggtatggcaagtcagaagtgaaaacccagggcttaactctgggactgcttttgaaactgtcagactggagtgcaggagaggtaagcggaattcctagtgtagcggtgaaatgcgtagatattaggaggaacatcagtggcgaaggcggcttactggactgaaactgacactgaggcacgaaagcgtggggagcaaacaggattagataccctggtagtccacgccgtaaacgatgaatactaggtgtcggggccgtagaggcttcggtgccgcagccaacgcagtaagtattccacctggggagtacgttcgcaagaatgaaactcaaaggaattgacggggacccgcacaagcggtggagcatgtggtttaattcgaagcaacgcgaagaaccttacctggtcttgacatccttctgaccggtccttaaccggacctttccttcgggacaggagtgacaggtggtgcatggttgtcgtcagctcgtgtcgtgagatgttgggttaagtcccgcaacgagcgcaacccctatctttagtagccagcatataaggtgggcactctagagagactgccagggataacctggaggaaggtggggacgacgtcaaatcatcatgccccttatgaccagggctacacacgtgctacaatggcgtaaacagagggaagcagcctcgtgagagtgagcaaatcccaaaaataacgtctcagttcggattgtagtctgcaactcgactacatgaagctggaatcgctagtaatcgcgaatcagaatgtcgcggtgaatacgttcccgggtcttgtacacaccgcccgtcacaccatgggagtcagtaacgcccgaagtcagtgacccaaccgtaaggagggag

SEQ ID NO: 312 - DNA, 1388 bp, Alistipes shahii
  modified_base (25)..(25): a, c, t, g, unknown or other
  modified_base (27)..(28): a, c, t, g, unknown or other
  modified_base (258)..(258): a, c, t, g, unknown or other
gcagtcgaggggcagcacggtgtancnngacactggtggcgaccggcgcacgggtgcgtaacgcgtatgcaacctacccataacagggggataacactgagaaattggtactaataccccataacatcaggaccggcgtcggttctggttgaaaactccggtggttatggatgggcatgcgttgtattaggtggttggtgaggtaacggctcaccagggcaacgatacatagggggactgagaggttaaccccccacnttggtactgagacacggaccaaactcctacgggaggcagcagtgaggaatattggtcaatggacgcaagtctgaaccagccatgccgcgtgcaggaagacggctctatgagttgtaaactgcttttgtacgagagtaaacgctcttacgtgtaagagcctgaaagtatcgtacgaataaggatcggctaactccgtgccagcagccgcggtaatacggaggatccaagcgttatccggatttattgggtttaaagggtgcgtaggcggtttgataagttagaggtgaaataccggtgcttaacaccggaactgcctctaatactgttgaactagagagtagttgcggtaggcggaatgtatggtgtagcggtgaaatgcttagagatcatacagaacaccgattgcgaaggcagcttaccaaactatatctgacgttgaggcacgaaagcgtggggagcaaacaggattagataccctggtagtccacgcagtaaacgatgataactcgctgtcggcgatacacagtcggcggctaagcgaaagcgataagttatccacctggggagtacgttcgcaagaatgaaactcaaaggaattgacgggggcccgcacaagcggaggaacatgtggtttaattcgatgatacgcgaggaaccttacccgggcttgaaagttactgacgattctggaaacaggatttcccttcggggcaggaaactaggtgctgcatggttgtcgtcagctcgtgccgtgaggtgtcgggttaagtcccataacgagcgcaacccctaccgttagttgccatcaggtcaagctgggcactctggcgggactgccggtgtaagccgagaggaaggtggggatgacgtcaaatcagcacggcccttacgtccggggctacacacgtgttacaatggtaggtacagagggcagctacccagtgatgggatgcgaatctcgaaagcctatctcagttcggatcggaggctgaaacccgcctccgtgaagttggattcgctagtaatcgcgcatcagccatggcgcggtgaatacgttcccgggccttgtacacaccgcccgtcaagccatggaagctgggggtgcctgaagttcgtgaccgcaaggagcg

SEQ ID NO: 313 - DNA, 1372 bp, Collinsella aerofaciens
  modified_base (5)..(5): a, c, t, g, unknown or other
tgcantcgaacggcacctatcttcggatagaagcgagtggcgaacggctgagtaacacgtggagaacctgccccctcccccgggatagccgcccgaaaggacgggtaataccggataccccggggtgccgcatggcgccccggctaaagccccgacgggaggggatggctccgcggcccatcaggtagacggcggggtgacggcccaccgtgccgacaacgggtagccgggttgagagaccgaccggccagattgggactgagacacggcccagactcctacgggaggcagcagtggggaatcttgcgcaatggggggaaccctgacgcagcgacgccgcgtgcgggacggaggccttcgggtcgtaaaccgctttcagcagggaagagtcaagactgtacctgcagaagaagccccggctaactacgtgccagcagccgcggtaatacgtagggggcgagcgttatccggattcattgggcgtaaagcgcgcgtaggcggcccggcaggccgggggtcgaagcggggggctcaaccccccgaagcccccggaacctccgcggcttgggtccggtaggggagggtggaacacccggtgtagcggtggaatgcgcagatatcgggtggaacaccggtggcgaaggcggccctctgggccgagaccgacgctgaggcgcgaaagctgggggagcgaacaggattagataccctggtagtcccagccgtaaacgatggacgctaggtgtggggggacgatccccccgtgccgcagccaacgcattaagcgtcccgcctggggagtacggccgcaaggctaaaactcaaaggaattgacgggggcccgcacaagcagcggagcatgtggcttaattcgaagcaacgcgaagaaccttaccagggcttgacatatgggtgaagcggggggagaccccgtggccgagaggagcccatacaggtggtgcatggctgtcgtcagctcgtgtcgtgagatgttgggttaagtcccgcaacgagcgcaacccccgccgcgtgttgccatcgggtgatgccgggaacccacgcgggaccgccgccgtcaaggcggaggagggcggggacgacgtcaagtcatcatgccccttatgccctgggctgcacacgtgctacaatggccggtacagagggatgccaccccgcgagggggagcggatcccggaaagccggccccagttcggattgggggctgcaacccgcccccatgaagtcggagttgctagtaatcgcggatcagcatgccgcggtgaatgcgttcccgggccttgtacacaccgcccgtcacaccacccgagtcgtctgcacccgaagtcgccggcccaaccgagaggggggaggc

SEQ ID NO: 314 - DNA, 1398 bp, Unknown
  Description of Unknown: Anaerotignum lactatifermentans sequence
  modified_base (8)..(11): a, c, t, g, unknown or other
  modified_base (1394)..(1394): a, c, t, g, unknown or other
tgcagtcnnnnaagatatttagaatgagagcttcggcaggatttttatctatcttagtggcggacgggtgagtaacgtgtgggcaacctgccctgtactggggaataatcattggaaacgatgactaataccgcatgtggtcctcggaaggcatcttctgaggaagaaaggatttattcggtacaggatgggcccgcatctgattagctagttggtgagataacagcccaccaaggcgacgatcagtagccgacctgagagggtgatcggccacattgggactgagacacggcccaaactcctacgggaggcagcagtggggaatattgcacaatgggcgaaagcctgatgcagcaacgccgcgtgaaggatgaagggtttcggctcgtaaacttctatcaatagggaagaaacaaatgacggtacctaaataagaagccccggctaactacgtgccagcagccgcggtaatacgtagggggcaagcgttatccggaattactgggtgtaaagggagcgtaggcggcatggtaagccagatgtgaaagccttgggcttaacccgaggattgcatttggaactatcaagctagagtacaggagaggaaagcggaattcctagtgtagcggtgaaatgcgtagatattaggaagaacaccagtggcgaaggcggctttctggactgaaactgacgctgaggctcgaaagcgtggggagcaaacaggattagataccctggtagtccacgccgtaaacgatgagtgctaggtgtcggggaggaatcctcggtgccgcagctaacgcaataagcactccacctggggagtacgaccgcaaggttgaaactcaaaggaattgacgggggcccgcacaagcggtggagcatgtggtttaattcgaagcaacgcgaagaaccttaccaaggcttgacatcccgatgaccgtcctagagataggacttctcttcggagcatcggtgacaggtggtgcatgggttgtcgtcagctcgtgtcgtgagatgttgggttaagtcccgcaacgagcgcaacccttatcttcagtagccatcattcagttgggcactctggagagactgccgtggataacacggaggaaggtggggatgacgtcaaatcatcatgccccttatgtcttgggctacacacgtgctacaatggctggtaacaaagtgacgcaagacggcgacgttaagcaaatcacaaaaacccagtcccagttcggattgtagtctgcaactcgactacatgaagctggaatcgctagtaatcgcgaatcagcatgtcgcggtgaatacgttcccgggccttgtacacaccgcccgtcacaccatgggagttggaagcacccgaagtcggtgacctaaccgtaaggaangagc

SEQ ID NO: 315 - DNA, 1400 bp, Blautia obeum
  modified_base (9)..(9): a, c, t, g, unknown or other
  modified_base (18)..(21): a, c, t, g, unknown or other
  modified_base (23)..(23): a, c, t, g, unknown or other
  modified_base (1373)..(1373): a, c, t, g, unknown or other
tgcagtcgnacgggaacnnnntnattgaagcttcggcagatttagctggtttctagtggcggacgggtgagtaacgcgtgggtaacctgccttatacagggggataacaaccagaaatggttgctaataccgcataagcgcacaggaccgcatggtccggtgtgaaaaactccggtggtataagatggacccgcgttggattagctagttggcagggtaacggcctaccaaggcgacgatccatagccggcctgagagggtgaacggccacattgggactgagacacggcccagactcctacgggaggcagcagtggggaatattgcacaatgggggaaaccctgatgcagcgacgccgcgtgaaggaagaagtatctcggtatgtaaacttctatcagcagggaagatagtgacggtacctgactaagaagccccggctaactacgtgccagcagccgcggtaatacgtagggggcaagcgttatccggatttactgggtgtaaagggagcgtagacggactggcaagtctgatgtgaaaggcgggggctcaacccctggactgcattggaaactgttagtcttgagtgccggagaggtaagcggaattcctagtgtagcggtgaaatgcgtagatattaggaggaacaccagtggcgaaggcggcttactggacggtaactgacgttgaggctcgaaagcgtggggagcaaacaggattagataccctggtagtccacgccgtaaacgatgaatactaggtgttggggagcaaagctcttcggtgccgccgcaaacgcattaagtattccacctggggagtacgttcgcaagaatgaaactcaaaggaattgacggggacccgcacaagcggtggagcatgtggtttaattcgaagcaacgcgaagaaccttaccaagtcttgacatccctctgaccgttccttaaccggaactttccttcgggacaggggagacaggtggtgcatggttgtcgtcagctcgtgtcgtgagatgttgggttaagtcccgcaacgagcgcaacccctatccccagtagccagcagtccggctgggcactctgaggagactgccagggataacctggaggaaggcggggatgacgtcaaatcatcatgccccttatgatttgggctacacacgtgctacaatggcgtaaacaaagggaagcaagcctgcgaaggtaagcaaatcccaaaaataacgtcccagttcggactgcagtctgcaactcgactgcacgaagctggaatcgctagtaatcgcggatcagaatgccgcggtgaatacgttcccgggtcttgtacacaccgcccgtcacaccatgggagtcagtaacgcccgaagtcagtnacctaactgcaaagaaggagctgccga

SEQ ID NO: 316 - DNA, 1349 bp, Collinsella aerofaciens
  modified_base (5)..(5): a, c, t, g, unknown or other
tcgancggcacctatcttcggatagaagcgagtggcgaacggctgagtaacacgtggagaacctgccccctcccccgggatagccgcccgaaaggacgggtaataccggatacccccgggcgccgcatggcgcccgggctaaagccccgacgggaggggatggctccgcggcccatcaggtagacggcggggtgacggcccaccgtgccgacaacgggtagccgggttgagagaccgaccggccagattgggactgagacacggcccagactcctacgggaggcagcagtggggaatcttgcgcaatggggggaaccctgacgcagcgacgccgcgtgcgggacggaggccttcgggtcgtaaaccgctttcagcagggaagagtcaagactgtacctgcagaagaagccccggctaactacgtgccagcagccgcggtaatacgtagggggcgagcgttatccggattcattgggcgtaaagcgcgcgtaggcggcccggccaggccgggggtcgaagcggggggctcaaccccccgaagcccccggaacctccgcggcttgggtccggtaggggagggtggaacacccggtgtagcggtggaatgcgcagatatcgggtggaacaccggtggcgaaggcggccctctgggccgagaccgacgctgaggcgcgaaagctgggggagcgaacaggattagataccctggtagtcccagccgtaaacgatggacgctaggtgtggggggacgatccccccgtgccgcagccaacgcattaagcgtcccgcctggggagtacggccgcaaggctaaaactcaaaggaattgacgggggcccgcacaagcagcggagcatgtggcttaattcgaagcaacgcgaagaaccttaccagggcttgacatatgggtgaagcgggggagaccccgtggccgagaggagcccatacaggtggtgcatggctgtcgtcagctcgtgtcgtgagatgttgggttaagtcccgcaacgagcgcaacccccgccgcgtgttgccatcgggtgatgccgggaacccacgcgggaccgccgccgtcaaggcggaggagggcggggacgacgtcaagtcatcatgccccttatgccctgggctgcacacgtgctacaatggccggtacagagggatgccaccccgcgagggggagcggatcccggaaagccggccccagttcggattgggggctgcaacccgcccccatgaagtcggagttgctagtaatcgcggatcagcatgccgcggtgaatgcgttcccgggccttgtacacaccgcccgtcacaccacccgagtcgtctgcacccgaagtcgccggccc

SEQ ID NO: 317 - DNA, 1372 bp, Bifidobacterium longum
  modified_base (5)..(5): a, c, t, g, unknown or other
ggganccatcaggctttgcttggtggtgagagtggcgaacgggtgagtaatgcgtgaccgacctgccccatacaccggaatagctcctggaaacgggtggtaatgccggatgctccagttgatcgcatggtcttctgggaaagctttcgcggtatgggatggggtcgcgtcctatcagcttgacggcggggtaacggcccaccgtggcttcgacgggtagccggcctgagagggcgaccggccacattgggactgagatacggcccagactcctacgggaggcagcagtggggaatattgcacaatgggcgcaagcctgatgcagcgacgccgcgtgagggatggaggccttcgggttgtaaacctcttttatcggggagcaagcgagagtgagtttacccgttgaataagcaccggctaactacgtgccagcagccgcggtaatacgtagggtgcaagcgttatccggaattattgggcgtaaagggctcgtaggcggttcgtcgcgtccggtgtgaaagtccatcgcttaacggtggatccgcgccgggtacgggcgggcttgagtgcggtaggggagactggaattcccggtgtaacggtggaatgtgtagatatcgggaagaacaccaatggcgaaggcaggtctctgggccgttactgacgctgaggagcgaaagcgtggggagcgaacaggattagataccctggtagtccacgccgtaaacggtggatgctggatgtggggcccgttccacgggttccgtgtcggagctaacgcgttaagcatcccgcctggggagtacggccgcaaggctaaaactcaaagaaattgacgggggcccgcacaagcggcggagcatgcggattaattcgatgcaacgcgaagaaccttacctgggcttgacatgttcccgacggtcgtagagatacggcttcccttcggggcgggttcacaggtggtgcatggtcgtcgtcagctcgtgtcgtgagatgttgggttaagtcccgcaacgagcgcaaccctcgccccgtgttgccagcggattatgccgggaactcacgggggaccgccggggttaactcggaggaaggtggggatgacgtcagatcatcatgccccttacgtccagggcttcacgcatgctacaatggccggtacaacgggatgcgacgcggcgacgcggagcggatccctgaaaaccggtctcagttcggatcgcagtctgcaactcgactgcgtgaaggcggagtcgctagtaatcgcgaatcagcaacgtcgcggtgaatgcgttcccgggccttgtacacaccgcccgtcaagtcatgaaagtgggcagcacccgaagccggtggcctaaccccttgtggg

SEQ ID NO: 318 - DNA, 1363 bp, Collinsella aerofaciens
  modified_base (5)..(5): a, c, t, g, unknown or other
  modified_base (10)..(10): a, c, t, g, unknown or other
tgcantcgancggcacctatcttcggatagaagcgagtggcgaacggctgagtaacacgtggagaacctgccccctcccccgggatagccgcccgaaaggacgggtaataccggataccccggggtgccgcatggcgccccggctaaagccccgacgggaggggatggctccgcggcccatcaggtagacggcggggtgacggcccaccgtgccgacaacgggtagccgggttgagagaccgaccggccagattgggactgagacacggcccagactcctacgggaggcagcagtggggaatcttgcgcaatggggggaaccctgacgcagcgacgccgcgtgcgggacggaggccttcgggtcgtaaaccgctttcagcagggaagagtcaagactgtacctgcagaagaagccccggctaactacgtgccagcagccgcggtaatacgtagggggcgagcgttatccggattcattgggcgtaaagcgcgcgtaggcggcccggcaggcccgggggtcgaagcggggggctcaaccccccgaagcccccggaacctccgcggcttgggtccggtaggggagggtggaacacccggtgtagcggtggaatgcgcagatatcgggtggaacaccggtggcgaaggcggccctctgggccgagaccgacgctgaggcgcgaaagctgggggagcgaacaggattagataccctggtagtcccagccgtaaacgatggacgctaggtgtggggggacgatccccccgtgccgcagccaacgcattaagcgtcccgcctggggagtacggccgcaaggctaaaactcaaaggaattgacgggggcccgcacaagcagcggagcatgtggcttaattcgaagcaacgcgaagaaccttaccagggcttgacatatgggtgaagcgggggagaccccgtgggccgagaggagcccatacaggtggtgcatggctgtcgtcagctcgtgtcgtgagatgttgggttaagtcccgcaacgagcgcaacccccgccgcgtgttgccatcgggtgatgccgggaacccacgcgggaccgccgccgtcaaggcggaggagggcggggacgacgtcaagtcatcatgccccttatgccctgggctgcacacgtgctacaatggccggtacagagggatgccaccccgcgagggggagcggatcccggaaagccggccccagttcggattgggggctgcaacccgcccccatgaagtcggagttgctagtaatcgcggatcagcatgccgcggtgaatgcgttcccgggccttgtacacaccgcccgtcacaccacccgagtcgtctgcacccgaagtcgccggcccaaccgaga

SEQ ID NO: 319 - DNA, 1366 bp, Collinsella aerofaciens
  modified_base (8)..(10): a, c, t, g, unknown or other
tgcagtcnnnggcacctatcttcggatagaagcgagtggcgaacggctgagtaacacgtggagaacctgccccctcccccgggatagccgcccgaaaggacgggtaataccggataccccggggtgccgcatggcgccccggctaaagccccgacgggaggggatggctccgcggcccatcaggtagacggcggggtgacggcccaccgtgccgacaacgggtagccgggttgagagaccgaccggccagattgggactgagacacggcccagactcctacgggaggcagcagtggggaatcttgcgcaatggggggaaccctgacgcagcgacgccgcgtgcgggacggaggccttcgggtcgtaaaccgctttcagcagggaagagtcaagactgtacctgcagaagaagccccggctaactacgtgccagcagccgcggtaatacgtagggggcgagcgttatccggattcattgggcgtaaagcgcgcgtaggcggcccggcaggccgggggtcgaagcggggggctcaaccccccgaagcccccggaacctccgcggcttgggtccggtaggggagggtggaacacccggtgtagcggtggaatgcgcagatatcgggtggaacaccggtggcgaaggcggccctctgggccgagaccgacgctgaggcgcgaaagctgggggagcgaacaggattagataccctggtagtcccagccgtaaacgatggacgctaggtgtggggggacgatccccccgtgccgcagccaacgcattaagcgtcccgcctggggagtacggccgcaaggctaaaactcaaaggaattgacgggggcccgcacaagcagcggagcatgtggcttaattcgaagcaacgcgaagaaccttaccagggcttgacatatgggtgaagcggggggagaccccgtggccgagaggagcccatacaggtggtgcatggctgtcgtcagctcgtgtcgtgagatgttgggttaagtcccgcaacgagcgcaacccccgccgcgtgttgccatcgggtgatgccgggaacccacgcgggaccgccgccgtcaaggcggaggagggcggggacgacgtcaagtcatcatgccccttatgccctgggctgcacacgtgctacaatggccggtacagagggatgccaccccgcgagggggagcggatcccggaaagccggccccagttcggattgggggctgcaacccgcccccatgaagtcggagttgctagtaatcgcggatcagcatgccgcggtgaatgcgttcccgggccttgtacacaccgcccgtcacaccacccgagtcgtctgcacccgaagtcgccggcccaaccgagaggggg

SEQ ID NO: 320 - DNA, 1403 bp, Dorea formicigenerans
  modified_base (2)..(3): a, c, t, g, unknown or other
  modified_base (24)..(24): a, c, t, g, unknown or other
  modified_base (1395)..(1398): a, c, t, g, unknown or other
  modified_base (1401)..(1402): a, c, t, g, unknown or other
anncatgcagtcgagcgaagcacntaagtttgattcttcggatgaagacttttgtgactgagcggcggacgggtgagtaacgcgtgggtaacctgcctcatacagggggataacagttagaaatggctgctaataccgcataagaccacagtactgcatggtacagtggtaaaaactccggtggtatgagatggacccgcgtctgattaggtagttggtgaggtaacggcccaccaagccgacgatcagtagccgacctgagagggtgaccggccacattgggactgagacacggcccagactcctacgggaggcagcagtggggaatattgcacaatgggcgaaagcctgatgcagcgacgccgcgtgaaggatgaagtatttcggtatgtaaacttctatcagcagggaagaaaatgacggtacctgactaagaagccccggctaactacgtgccagcagccgcggtaatacgtagggggcaagcgttatccggatttactgggtgtaaagggagcgtagacggctgtgcaagtctgaagtgaaaggcatgggctcaacctgtggactgctttggaaactgtgcagctagagtgtcggagaggtaagtggaattcctagtgtagcggtgaaatgcgtagatattaggaggaacaccagtggcgaaggcggcttactggacgatgactgacgttgaggctcgaaagcgtggggagcaaacaggattagataccctggtagtccacgccgtaaacgatgactgctaggtgtcgggtagcaaagctattcggtgccgcagctaacgcaataagcagtccacctggggagtacgttcgcaagaatgaaactcaaaggaattgacggggacccgcacaagcggtggagcatgtggtttaattcgaagcaacgcgaagaaccttacctgatcttgacatcccgatgaccgcttcgtaatggaagctttttcttcggaacatcggtgacaggtggtgcatggttgtcgtcagctcgtgtcgtgagatgttgggttaagtcccgcaacgagcgcaacccttatcttcagtagccagcatttaggatgggcactctggagagactgccagggataacctggaggaaggtggggatgacgtcaaatcatcatgccccttatgaccagggctacacacgtgctacaatggcgtaaacaaagggaagcagagccgcgaggccgagcaaatctcaaaaataacgtctcagttcggattgtagtctgcaactcgactacatgaagctggaatcgctagtaatcgcagatcagaatgctgcggtgaatacgttcccgggtcttgtacacaccgcccgtcacaccatgggagtcagtaacgcccgaagtcagtgacccaaccgaaaggnnnngcnnc

SEQ ID NO: 321 - DNA, 1394 bp, Bacteroides vulgatus
  modified_base (17)..(17): a, c, t, g, unknown or other
  modified_base (22)..(23): a, c, t, g, unknown or other
  modified_base (51)..(51): a, c, t, g, unknown or other
  modified_base (70)..(70): a, c, t, g, unknown or other
  modified_base (93)..(94): a, c, t, g, unknown or other
  modified_base (155)..(155): a, c, t, g, unknown or other
  modified_base (187)..(187): a, c, t, g, unknown or other
  modified_base (1144)..(1144): a, c, t, g, unknown or other
  modified_base (1382)..(1383): a, c, t, g, unknown or other
  modified_base (1392)..(1392): a, c, t, g, unknown or other
tcgaggggcagcatggncttanngtgctaaggccgatggcgaccggcgcangggtgagtaacacgtatcnaacctgccgtctactcttggacnnccttctgaaaggaagattaatacaagatggcatcatgagtcggcaggttcacatgattagngggattccggtagacgatggggatgggttccnttagatagtaggcggggtaacggcccacctagtcttcgatggataggggttctgagaggaaggtcccccacattggaactgagacacggtccaaacggatgggggaggcagcagtgagggaatatttgggtcaatgggcgagagcctgaacccagccaagtagcgtgaaggatgactgccctatgggttgtaaacttcttttataaaggaataaagttcgggtatggatacccgtttgcatgtactttatgaataaggatcggcttaactccgtgccagcagccgcggtaatacggaggatccgagcgttatccggattttattgggtttaaaagggagcgtaggatggatgtttaagtcagttgtgaaagtttgcggctcaaccgtaaaattgcagttgatactggatatcttgagtgcagttgaggcaggcggaattcgtggtgtagcggtgaaatgcttagatatcacgaagaactccgattgcgaaggcagcctgctaagctgcaactgacattgaggctcgaaagtgtgggtatcaaacaggattagataccctggtagtccacacggtaaacgatgaatactcgctgtttgcgatatactgcaagcggccaagcgaaagcgttaagtattccacctggggagtacgccggcaacggtgaaactcaaaggaattgacgggggcccgcacaagcggaggaacatgtggtttaattcgatgatacgcgaggaaccttacccgggcttaaattgcagatgaattacggtgaaagccgtaagccgcaaggcatctgtgaaggtgctgcatggttgtcgtcagctcgtgccgtgaggtgtcggcttaagtgccataacgagcgcaacccttgttgtcagttactaacaggttccgctgaggactctgacaagactgccatcgtaagatgtgaggaaggtggggatgacgtcaaatcngcacggcccttacgtccggggctacacacgtgttacaatggggggtacagagggccgctaccacgcgagtggatgccaatccccaaaacctctctcagttcggactggagtctgcaacccgactccacgaagctggattcgctagtaatcgcgcatcagccacggcgcggtgaatacgttcccgggccttgtacacaccgcccgtcaagccatgggagccgggggtacctgaagtgcnnaaccgcganga

SEQ ID NO: 322 - DNA, 1384 bp, Bifidobacterium adolescentis
  modified_base (9)..(9): a, c, t, g, unknown or other
  modified_base (127)..(127): a, c, t, g, unknown or other
  modified_base (129)..(129): a, c, t, g, unknown or other
  modified_base (1375)..(1375): a, c, t, g, unknown or other
  modified_base (1381)..(1382): a, c, t, g, unknown or other
tgcagtcgnacgggatcccaggagcttgctcctgggtgagagtggcgaacgggtgagtaatgcgtgaccgacctgccccatacaccggaatagctcctggaaacgggtggtaatgccggatgctccnantggatgcatgtccttccgggaaagattcatcggtatgggatggggtcgcgtcctatcagcttgatggcggggtaacggcccaccatggcttcgacgggtagccggcctgagagggcgaccggccacattgggactgagatacggcccagactcctacgggaggcagcagtggggaatattgcacaatgggcgcaagcctgatgcagcgacgccgcgtgcgggatgacggccttcgggttgtaaaccgcttttgactgggagcaagcccttcggggtgagtgtacctttcgaataagcaccggctaactacgtgccagcagccgcggtaatacgtagggtgcaagcgttatccggaattattgggcgtaaagggctcgtaggcggttcgtcgcgtccggtgtgaaagtccatcgcttaacggtggatccgcgccgggtacgggcgggcttgagtgcggtaggggagactggaattcccggtgtaacggtggaatgtgtagatatcgggaagaacaccaatggcgaaggcaggtctctgggccgtcactgacgctgaggagcgaaagcgtggggagcgaacaggattagataccctggtagtccacgccgtaaacggtggatgctggatgtggggaccattccacggtctccgtgtcggagccaacgcgttaagcatcccgcctggggagtacggccgcaaggctaaaactcaaagaaattgacgggggcccgcacaagcggcggagcatgcggattaattcgatgcaacgcgaagaaccttacctgggcttgacatgttcccgacagccccagagatggggcctcccttcggggcgggttcacaggtggtgcatggtcgtcgtcagctcgtgtcgtgagatgttgggttaagtcccgcaacgagcgcaaccctcgccctgtgttgccagcacgtcgtggtgggaactcacgggggaccgccggggtcaactcggaggaaggtggggatgacgtcagatcatcatgccccttacgtccagggcttcacgcatgctacaatggccggtacaacgggatgcgacaccgcgaggtggagcggatcccttaaaaccggtctcagttcggattggagtctgcaacccgactccatgaaggcggagtcgctagtaatcgcggatcagcaacgccgcggtgaatgcgttcccgggccttgtacacaccgcccgtcaagtcatgaaagtgggtagcacccgaagccggtggcccancctttnngg

SEQ ID NO: 323 - DNA, 1392 bp, Blautia wexlerae
  modified_base (12)..(12): a, c, t, g, unknown or other
  modified_base (32)..(32): a, c, t, g, unknown or other
  modified_base (39)..(39): a, c, t, g, unknown or other
  modified_base (1385)..(1386): a, c, t, g, unknown or other
gtcgacgggaantactttattgaaacttcggnggatttnatttaattctagtggcggacgggtgagtaacgcgtgggtaacctgccttatacagggggataacagtcagaaatggctgctaataccgcataagcgcacagagctgcatggctcagtgtgaaaaactccggtggtataagatggacccgcgttggattagcttgttggtggggtaacggcccaccaaggcgacgatccatagccggcctgagagggtgaacggccacattgggactgagacacggcccagactcctacgggaggcagcagtggggaatattgcacaatgggggaaaccctgatgcagcgacgccgcgtgaaggaagaagtatctcggtatgtaaacttctatcagcagggaagatagtgacggtacctgactaagaagccccggctaactacgtgccagcagccgcggtaatacgtagggggcaagcgttatccggatttactgggtgtaaagggagcgtagacggtgtggcaagtctgatgtgaaaggcatgggctcaacctgtggactgcattggaaactgtcatacttgagtgccggaggggtaagcggaattcctagtgtagcggtgaaatgcgtagatattaggaggaacaccagtggcgaaggcggcttactggacggtaactgacgttgaggctcgaaagcgtggggagcaaacaggattagataccctggtagtccacgccgtaaacgatgaatactaggtgtcgggtggcagagccattcggtgccgtcgcaaacgcagtaagtattccacctggggagtacgttcgcaagaatgaaactcaaaggaattgacggggacccgcacaagcggtggagcatgtggtttaattcgaagcaacgcgaagaaccttaccaagtcttgacatccgcctgaccgatccttaaccggatctttccttcgggacaggcgagacaggtggtgcatggttgtcgtcagctcgtgtcgtgagatgttgggttaagtcccgcaacgagcgcaacccctatcctcagtagccagcatttaaggtgggcactctggggagactgccagggataacctggaggaaggcggggatgacgtcaaatcatcatgccccttatgatttgggctacacacgtgctacaatggcgtaaacaaagggaagcgagattgtgagatggagcaaatcccaaaaataacgtcccagttcggactgtagtctgcaacccgactacacgaagctggaatcgctagtaatcgcggatcagaatgccgcggtgaatacgttcccgggtcttgtacacaccgcccgtcacaccatgggagtcagtaacgcccgaagtcagtgacctaactgcaaagaannagctgc

SEQ ID NO: 324 - DNA, 1415 bp, Bilophila wadsworthia
  modified_base (8)..(11): a, c, t, g, unknown or other
tgcagtcnnnngtgaaagtccttcgggacgagtaaagtggcgcacgggtgagtaacgcgtggataatctacccttaagatggggataacggctggaaacggtcgctaataccgaatacgctcccgattttatcattggggggaaagatggcctctgcttgcaagctatcgcttaaggatgagtccgcgtcccattagctagttggcggggtaacggcccaccaaggcaacgatgggtagccggtctgagaggatgaccggccacactggaactggaacacggtccagactcctacgggaggcagcagtggggaatattgcgcaatgggcgaaagcctgacgcagcgacgccgcgtgagggatgaaggttctcggatcgtaaacctctgtcaggggggaagaaaccccctcgtgtgaataatgcgagggcttgacggtacccccaaaggaagcaccggctaactccgtgccagcagccgcggtaatacggagggtgcaagcgttaatcggaatcactgggcgtaaagcgcacgtaggcggcttggtaagtcaggggtgaaatcccacagcccaactgtggaactgcctttgatactgccaggcttgagtaccggagagggtggcggaattccaggtgtaggagtgaaatccgtagatatctggaggaacaccggtggcgaaggcggccacctggacggtaactgacgctgaggtgcgaaagcgtgggtagcaaacaggattagataccctggtagtccacgctgtaaacgatgggtgctgggtgctgggatgtatgtctcggtgccgtagctaacgcgataagcaccccgcctggggagtacggtcgcaaggctgaaactcaaagaaattgacgggggcccgcacaagcggtggagtatgtggtttaattcgatgcaacgcgaagaaccttacccaggcttgacatctagggaacccttcggaaatgaaggggtgcccttcggggagccctaagacaggtgctgcatggctgtcgtcagctcgtgccgtgaggtgttgggttaagtcccgcaacgagcgcaacccctatcttcagttgccagcaggtaaggctgggcactctggagagaccgccccggtcaacggggaggaaggtggggacgacgtcaagtcatcatggcccttacgcctggggctacacacgtactacaatggcgcgcacaaagggtagcgagaccgcgaggtggagccaatcccaaaaaacgcgtcccagtccggattggagtctgcaactcgactccatgaagtcggaatcgctagtaattcgagatcagcatgctcgggtgaatgcgttcccgggccttgtacacaccgcccgtcacaccacgaaagtcggttttacccgaagccggtgagctaactcgcaagaggagcagc

SEQ ID NO: 325 - DNA, 1398 bp, Alistipes indistinctus
  modified_base (2)..(3): a, c, t, g, unknown or other
anncatgcagtcgaggggcagcgggtggagtatttcggtactcctgccggcgaccggcgcacgggtgcgtaacgcgtatgcaacctacctttaacagggggataatccgaagaaatttggtctaataccccataatatcatttaaggcatcttagatggttgaaaattccgatggttagagatgggcatgcgttgtattagctagttggtgaggtaacggctcaccaaggctacgatacatagggggactgagaggttttccccccacactggtactgagacacggaccagactcctacgggaggcagcagtgaggaatattggtcaatggacgcaagtctgaaccagccatgccgcgtgcaggatgaaggtgctatgcattgtaaactgcttttgtacgagggtaaatgcaggtacgtgtacctgtttgaaagtatcgtacgaataagggtcggctaactccgtgccagcagccgcggtaatacggaggacccgagcgttatccggatttattgggtttaaagggtgcgtaggcggattagtaagttagaggtgaaagctcgatgctcaacatcgaaattgcctctgatactgttagtctagagtatagttgcggaaggcggaatgtgtggtgtagcggtgaaatgcttagatatcacacagaacaccgattgcgaaggcagctttccaagctattactgacgctgatgcacgaaagcgtggggagcgaacaggattagataccctggtagtccacgccgtaaacgatgataactcgttgcaggcgatacacagtctgtgacttagcgaaagcgttaagttatccacctggggagtacgttcgcaagaatgaaactcaaaggaattgacgggggcccgcacaagcggaggaacatgtggtttaattcgatgatacgcgaggaaccttacccgggcttgaaagttagcgacggatcctgaaaggggtcttctcttcggagcgcgaaactaggtgctgcatggttgtcgtcagctcgtgccgtgaggtgtcgggttaagtcccataacgagcgcaacccctactgttagttaccagcacgtcaaggtgggcactctagcaggactgccggtgtaagccgagaggaaggtggggatgacgtcaaatcagcacggcccttacgtccggggcgacacacgtgttacaatggtcggtacagagggtcgctaccccgtgaggggatgccaatctcgaaagccgatctcagttcggattggaggctgaaactcgcctccatgaagttggattcgctagtaatcgcgcatcagccatggcgcggtgaatacgttcccgggccttgtacacaccgcccgtcaagccatgggagttgggggtgcctgaagtacgtgaccgcaaggagc

SEQ ID NO: 326 - DNA, 1394 bp, Bacteroides vulgatus
  modified_base (7)..(7): a, c, t, g, unknown or other
  modified_base (22)..(22): a, c, t, g, unknown or other
  modified_base (27)..(28): a, c, t, g, unknown or other
  modified_base (55)..(56): a, c, t, g, unknown or other
  modified_base (75)..(76): a, c, t, g, unknown or other
  modified_base (160)..(160): a, c, t, g, unknown or other
  modified_base (192)..(192): a, c, t, g, unknown or other
  modified_base (224)..(224): a, c, t, g, unknown or other
  modified_base (1393)..(1393): a, c, t, g, unknown or other
gcagtcngaggggcagcatggncttanngtgctaaggccgatggcgaccggcgcnngggtgagtaacacgtatcnnacctgccgtctactcttggacagccttctgaaaggaagattaatacaagatggcatcatgagtcggcaggttcacatgattagngggattccggtagacgatggggatgggttccnttagatagtaggcggggtaacggcccacctantcttcgatggataggggttctgagaggaaggtcccccacattggaactgagacacggtccaaactcctacgggaggcagcagtgaggaatattggtcaatgggcgagagcctgaaccagccaagtagcgtgaaggatgactgccctatgggttgtaaacttcttttataaaggaataaagtcgggtatggatacccgtttgcatgtactttatgaataaggatcggctaactccgtgccagcagccgcggtaatacggaggatccgagcgttatccggatttattgggtttaaagggagcgtagatggatgtttaagtcagttgtgaaagtttgcggctcaaccgtaaaattgcagttgatactggatatcttgagtgcagttgaggcaggcggaattcgtggtgtagcggtgaaatgcttagatatcacgaagaactccgattgcgaaggcagcctgctaagctgcaactgacattgaggctcgaaagtgtgggtatcaaacaggattagataccctggtagtccacacggtaaacgatgaatactcgctgtttgcgatatactgcaagcggccaagcgaaagcgttaagtattccacctggggagtacgccggcaacggtgaaactcaaaggaattgacgggggcccgcacaagcggaggaacatgtggtttaattcgatgatacgcgaggaaccttacccgggcttaaattgcagatgaattacggtgaaagccgtaagccgcaaggcatctgtgaaggtgctgcatggttgtcgtcagctcgtgccgtgaggtgtcggcttaagtgccataacgagcgcaacccttgttgtcagttactaacaggttttgctgaggactctgacaagactgccatcgtaagatgtgaggaaggtggggatgacgtcaaatcagcacggcccttacgtccggggctacacacgtgttacaatggggggtacagagggccgctaccacgcgagtggatgccaatccccaaaacctctctcagttcggactggagtctgcaacccgactccacgaagctggattcgctagtaatcgcgcatcagccacggcgcggtgaatacgttcccgggccttgtacacaccgcccgtcaagccatgggagccgggggtacctgaagtgcgtaaccgcgaggagcnc

SEQ ID NO: 327 - DNA, 1369 bp, Coprococcus comes
  modified_base (1364)..(1364): a, c, t, g, unknown or other
  modified_base (1366)..(1366): a, c, t, g, unknown or other
  modified_base (1368)..(1368): a, c, t, g, unknown or other
ctgattcttcggatgaaggtttttgtgactgagtggcggacgggtgagtaacgcgtgggtaacctgcctcatacagggggataacagttagaaatgactgctaataccgcataagaccacggagccgcatggctcagtgggaaaaactccggtggtatgagatgggcccgcgtctgattaggtagttggtggggtaacggcctaccaagccaacgatcagtagccgacctgagagggtgaccggccacattgggactgagacacggcccaaactcctacgggaggcagcagtggggaatattgcacaatgggggaaaccctgatgcagcgacgccgcgtgagcgaagaagtatttcggtatgtaaagctctatcagcagggaagaaaatgacggtacctgactaagaagcaccggctaaatacgtgccagcagccgcggtaatacgtatggtgcaagcgttatccggatttactgggtgtaaagggagcgtagacggctgtgtaagtctgaagtgaaagcccggggctcaaccccgggactgctttggaaactatgcagctagagtgtcggagaggtaagtggaattcccagtgtagcggtgaaatgcgtagatattgggaggaacaccagtggcgaaggcggcttactggacgatgactgacgttgaggctcgaaagcgtggggagcaaacaggattagataccctggtagtccacgccgtaaacgatgactactaggtgtcggggagcaaagctcttcggtgccgcagcaaacgcaataagtagtccacctggggagtacgttcgcaagaatgaaactcaaaggaattgacggggacccgcacaagcggtggagcatgtggtttaattcgaagcaacgcgaagaaccttacctgctcttgacatcccggtgaccggcatgtaatgatgccttttcttcggaacaccggtgacaggtggtgcatggttgtcgtcagctcgtgtcgtgagatgttgggttaagtcccgcaacgagcgcaacccttatcttcagtagccagcaattcggatgggcactctggagagactgccagggataacctggaggaaggtggggatgacgtcaaatcatcatgccccttatgagcagggctacacacgtgctacaatggcgtaaacaaagggaagcgagcctgcgagggtaagcaaatctcaaaaataacgtctcagttcggattgtagtctgcaactcgactacatgaagctggaatcgctagtaatcgcgaatcagcatgtcgcggtgaatacgttcccgggtcttgtacacaccgcccgtcacaccatgggagttggtaacgcccgaagtcagtgacccaaccgaaagnangna

SEQ ID NO: 328 - DNA, 1397 bp, Blautia luti
  modified_base (9)..(10): a, c, t, g, unknown or other
  modified_base (16)..(22): a, c, t, g, unknown or other
  modified_base (39)..(39): a, c, t, g, unknown or other
  modified_base (149)..(149): a, c, t, g, unknown or other
  modified_base (943)..(946): a, c, t, g, unknown or other
  modified_base (955)..(958): a, c, t, g, unknown or other
tgcagtcgnncgggannnnnnnttattgaagcttcggcngatttaggattgtttctagtggcggacgggtgagtaacgcgtgggtaacctgccttatacagggggataacagtcagaaatgactgctaataccgcataagcgcacaggnctgcatggctcggtgtgaaaaactccggtggtataagatggacccgcgttggattagctggttggtgaggtaacggcccaccaaggcgacgatccatagccggcctgagagggtgaacggccacattgggactgagacacggcccagactcctacgggaggcagcagtggggaatattgcacaatgggggaaaccctgatgcagcgacgccgcgtgaaggaagaagtatctcggtatgtaaacttctatcagcagggaagaaaatgacggtacctgactaagaagccccggctaactacgtgccagcagccgcggtaatacgtagggggcaagcgttatccggatttactgggtgtaaagggagcgtagacggatggacaagtctgatgtgaaaggctggggctcaaccccgggactgcattggaaactgcccgtcttgagtgccggagaggtaagcggaattcctagtgtagcggtgaaatgcgtagatattaggaggaacaccagtggcgaaggcggcttactggacggtaactgacgttgaggctcgaaagcgtggggagcaaacaggattagataccctggtagtccacgcggtaaacgatgaatgctaggtgtcgggggagcaaagctcttcggtgccgccgcaaacgcattaagcattccacctggggagtacgttcgcaagaatgaaactcaaaggaattgacggggacccgcacaagcggtggagcatgtggtttaattcgaagcaacgcgaagaaccttaccaagtcttgacatccctctgaccnnnncttaaccgnnnntttccttcgggacagaggagacaggtggtgcatggttgtcgtcagctcgtgtcgtgagatgttgggttaagtcccgcaacgagcgcaacccctatccccagtagccagcggttcggccgggcactctgaggagactgccagggataacctggaggaaggcggggatgacgtcaaatcatcatgccccttatgatttgggctacacacgtgctacaatggcgtaaacaaagggaagcgaacctgcgagggtgggcaaatcccaaaaataacgtcccagttcggactgtagtctgcaacccgactacacgaagctggaatcgctagtaatcgcggatcagaatgccgcggtgaatacgttcccgggtcttgtacacaccgcccgtcacaccatgggagtcagtaacgcccgaagtcagtgacctaaccgcaaggaaggagc

SEQ ID NO: 329 - DNA, 1398 bp, Alistipes indistinctus; identical to SEQ ID NO: 325
  modified_base (2)..(3): a, c, t, g, unknown or other

SEQ ID NO: 330 - DNA, 1390 bp, Bifidobacterium longum
  modified_base (1384)..(1385): a, c, t, g, unknown or other
tgcagtcgacgggatccatcaggctttgcttggtggtgagagtggcgaacgggtgagtaatgcgtgaccgacctgccccatacaccggaatagctcctggaaacgggtggtaatgccggatgctccagttgatcgcatggtcttctgggaaagctttcgcggtatgggatggggtcgcgtcctatcagcttgacggcggggtaacggcccaccgtggcttcgacgggtagccggcctgagagggcgaccggccacattgggactgagatacggcccagactcctacgggaggcagcagtggggaatattgcacaatgggcgcaagcctgatgcagcgacgccgcgtgagggatggaggccttcgggttgtaaacctcttttatcggggagcaagcgagagtgagtttacccgttgaataagcaccggctaactacgtgccagcagccgcggtaatacgtagggtgcaagcgttatccggaattattgggcgtaaagggctcgtaggcggttcgtcgcgtccggtgtgaaagtccatcgcttaacggtggatccgcgccgggtacgggcgggcttgagtgcggtaggggagactggaattcccggtgtaacggtggaatgtgtagatatcgggaagaacaccaatggcgaaggcaggtctctgggccgttactgacgctgaggagcgaaagcgtggggagcgaacaggattagataccctggtagtccacgccgtaaacggtggatgctggatgtggggcccgttccacgggttccgtgtcggagctaacgcgttaagcatcccgcctggggagtacggccgcaaggctaaaactcaaagaaattgacgggggcccgcacaagcggcggagcatgcggattaattcgatgcaacgcgaagaaccttacctgggcttgacatgttcccgacggtcgtagagatacggcttcccttcggggcgggttcacaggtggtgcatggtcgtcgtcagctcgtgtcgtgagatgttgggttaagtcccgcaacgagcgcaaccctcgccccgtgttgccagcggattatgccgggaactcacgggggaccgccggggttaactcggaggaaggtggggatgacgtcagatcatcatgccccttacgtccagggcttcacgcatgctacaatggccggtacaacgggatgcgacgcggcgacgcggagcggatccctgaaaaccggtctcagttcggatcgcagtctgcaactcgactgcgtgaaggcggagtcgctagtaatcgcgaatcagcaacgtcgcggtgaatgcgttcccgggccttgtacacaccgcccgtcaagtcatgaaagtgggcagcacccgaagccggtggcctaaccccttgtggganngagcc

SEQ ID NO: 331 - DNA, 1360 bp, Bacillus circulans
  modified_base (2)..(2): a, c, t, g, unknown or other
  modified_base (26)..(26): a, c, t, g, unknown or other
  modified_base (136)..(136): a, c, t, g, unknown or other
  modified_base (138)..(138): a, c, t, g, unknown or other
  modified_base (144)..(144): a, c, t, g, unknown or other
  modified_base (693)..(693): a, c, t, g, unknown or other
  modified_base (927)..(927): a, c, t, g, unknown or other
  modified_base (1034)..(1034): a, c, t, g, unknown or other
anacatgcagtcgagcggactttaanagcttgcttttaaagttagcggcggacgggtgagtaacacgtgggcaacctgcctgtaagactgggataacttcgggaaaccggagctaataccggataatcctttcccncncatggngaaaagctgaaagacggcatctcgctgtcacttacagatgggcccgcggcgcattagctagttggtgaggtaacggctcaccaaggcaacgatgcgtagccgacctgagagggtgatcggccacactgggactgagacacggcccagactcctacgggaggcagcagtagggaatcttccgcaatggacgaaagtctgacggagcaacgccgcgtgagtgatgaaggttttcggatcgtaaagctctgttgttagggaagaacaagtacaagagtaactgcttgtaccttgacggtacctaaccagaaagccacggctaactacgtgccagcagccgcggtaatacgtaggtggcaagcgttgtccggaattattgggcgtaaagcgcgcgcaggcggtcctttaagtctgatgtgaaagcccacggctcaaccgtggagggtcattggaaactgggggacttgagtgcagaagagaagagtggaattccacgtgtagcggtgaaatgcgtagagatgtggaggaacaccagtggcgaaggcgactctnggtctgtaactgacgctgaggcgcgaaagcgtggggagcaaacaggattagataccctggtagtccacgccgttaacgatgagtgctaagtgttagagggtttccgccctttagtgctgcagcaaacgcattaagcactccgcctggggagtacggccgcaaggctgaaactcaaaggaattgacgggggcccgcacaagcggtggagcatgtggtttaattcgaagcaacgcngaagaaccttaccaggtcttgacatcctttgacactcctagagataggacgttccccttcgggggacagagtgaccggtggtgcatggttgttgtcagcttgtgttntgagatgttgggttaagtcccgcaacgagcgcaacccttgattttagttgccagccttaagttgggcaatttaaggtgaatgccggtgacaaaccggaggaaggtggggatgacgtcaaatcatcctgccccttatgacctggggtacacacctggtacaatggatggtacaaagggcagcaaaaccgcgaggtcgagcaaatcccataaaacccttttcagttcggattgtagggtgcaaattgcctacctgaagccggaatcgcttgtaatcgcggatcagcctgccgcggggaatacgttcccgggccttgtacacaccgccc

SEQ ID NO: 332 - DNA, 1383 bp, Clostridium intestinale
  modified_base (28)..(28): a, c, t, g, unknown or other
tgcagtcgagcgaggaattccttcgggnatttcctagcggcggacgggtgagtaacacgtgggcaacctgcctgatagagggggatagcctcccgaaagggagattaataccgcataaagtcaaatgaaggcatcttcaaatgaccaaaggagtaatccgctatcagatgggcccgcggcgcattagctagttggtgaggtaacggctcaccaaggcgacgatgcgtagccgacctgagagggtgatcggccacattgggactgagacacggcccagactcctacgggaggcagcagtggggaatattgcacaatgggggaaaccctgatgcagcaacgccgcgtgagtgatgaaggccttcgggttgtaaagctctgtcttcagggacgataatgacggtacctgaggaggaagccacggctaactacgtgccagcagccgcggtaatacgtaggtggcaagcgttgtccggatttactgggcgtaaagggagcgtaggcggatacttaagtgggatgtgaaatacctgggcttaacttgggtgctgcattccaaactgggtgtctagagtgttggagaggaaagtggaattcctagtgtagcggtgaaatgcgtagagattaggaagaacaccagtggcgaaggcgactttctggacaataactgacgctgaggctcgaaagcgtggggagcaaacaggattagataccctggtagtccacgccgtaaacgatgggtactaggtgtagggggtatcgactccccctgtgccgccgttaacacaataagtaccccgcctggggagtacggtcgcaagattaaaactcaaaggaattgacgggggcccgcacaagcagcggagcatgtggtttaattcgaagcaacgcgaagaaccttacctagacttgacatctcctgcattactcttaatcgaggaagttctcccttcggggaggacaggaagacaggtggtgcatggttgtcgtcagctcgtgtcgtgagatgttgggttaagtcccgcaacgagcgcaacccttattgttagttgctaccatttagttgagcactctagcaagactgccgtggttaacgcggaggaaggtggggatgacgtcaaatcatcatgccccttatgtctagggctacacacgtgctacaatggcgagtacaaagagacgcaaagccgcgaggtggagcaaaacttataaaactcgtctcagttcggattgcaggctgaaactcgcctgcatgaagctggagttgctagtaatcgcgaatcagaatgtcgcggtgaatacgttcccgggccttgtacacaccgcccgtcacaccatgagagttggcaatacccgaagtccgtagcctaacctttaggagggcgc

SEQ ID NO: 333 - DNA, 1388 bp, Alistipes onderdonkii
  modified_base (30)..(30): a, c, t, g, unknown or other
gcagtcgaggggcatcacgaggtagcaatnactttggtggcgaccggcgcacgggtgcgtaacgcgtatgtaacctacctataacaggggcataacactgagaaattggtactaattccccataatattcggagaggcatctctccgggttgaaaactccggtggttatagatggacatgcgttgtattagctagttggtgaggtaacggctcaccaaggcaacgatacatagggggactgagaggttaaccccccacactggtactgagacacggaccagactcctacgggaggcagcagtgaggaatattggtcaatggacgcaagtctgaaccagccatgccgcgtgcaggaagacggctctatgagttgtaaactgcttttgtacgagggtaaactcacctacgtgtaggtgactgaaagtatcgtacgaataaggatcggctaactccgtgccagcagccgcggtaatacggaggattcaagcgttatccggatttattgggtttaaagggtgcgtaggcggtttgataagttagaggtgaaatcccggggcttaactccggaactgcctctaatactgttagactagagagtagttgcggtaggcggaatgtatggtgtagcggtgaaatgcttagagatcatacagaacaccgattgcgaaggcagcttaccaaactatatctgacgttgaggcacgaaagcgtggggagcaaacaggattagataccctggtagtccacgcagtaaacgatgataactcgttgtcggcgatacacagtcggtgactaagcgaaagcgataagttatccacctggggagtacgttcgcaagaatgaaactcaaaggaattgacgggggcccgcacaagcggaggaacatgtggtttaattcgatgatacgcgaggaaccttacccgggcttgaaagttactgacgattctggaaacaggatttccctttggggcaggaaactaggtgctgcatggttgtcgtcagctcgtgccgtgaggtgtcgggttaagtcccataacgagcgcaacccctaccgttagttgccatcaggtcaagctgggcactctggcgggactgccggtgtaagccgagaggaaggtggggatgacgtcaaatcagcacggcccttacgtccggggctacacacgtgttacaatggtaggtacagagggtcgctaccccgcgaggggatgccaatctcgaaagcctatctcagttcggattggaggctgaaacccgcctccatgaagttggattcgctagtaatcgcgcatcagccatggcgcggtgaatacgttcccgggccttgtacacaccgcccgtcaagccatggaagctgggggtgcctgaagttcgtgaccgcaaggagc

SEQ ID NO: 334 - DNA, 1376 bp, Bacteroides caccae
  modified_base (5)..(5): a, c, t, g, unknown or other
  modified_base (8)..(8): a, c, t, g, unknown or other
gtgtntgngttgcaaacgcaaagctggcgaccggcggcacgggtgagtaacacgtgatccaacctgcctcatactcggggatagcctttcgaaagaaagattaatatccgatagcatatatttcccgcatgggttttatattaaagaaattcggtatgagatggggatgcgttccattagtttgttggcggggtaacggcccaccaagactacgatggataggggttctgagaggaaggtcccccacattggaactgagacacggtccaaactcctacgggaggcagcagtgaggaatattggtcaatggacgcgagtctgaaccagccaagtagcgtgaaggatgactgccctatgggttgtaaacttcttttatatgggaataaagtggtccacgtgtggatttttgtatgtaccatatgaataaggatcggctaactccgtgccagcagccgcggtaatacggaggatccgagcgttatccggatttattgggtttaaagggagcgtaggcggattgttaagtcagttgtgaaagtttgcggctcaaccgtaaaattgcagttgatactggcagtcttgagtgcagtagaggtgggcggaattcgtggtgtagcggtgaaatgcttagatatcacgaagaactccgattgcgaaggcagctcactggagtgtaactgacgctgatgctcgaaagtgtgggtatcaaacaggattagataccctggtagtccacacagtaaacgatgaatactcgctgtttgcgatatacagtaagcggccaagcgaaagcattaagtattccacctggggagtacgccggcaacggtgaaactcaaaggaattgacgggggcccgcacaagcggaggaacatgtggtttaattcgatgatacgcgaggaaccttacccgggcttaaattgcaaatgaattatggggaaacccatacgccgcaaggcatttgtgaaggtgctgcatggttgtcgtcagctcgtgccgtgaggtgtcggcttaagtgccataacgagcgcaacccttatcttcagttactaacaggtcatgctgaggactctggagagactgccgtcgtaagatgtgaggaaggtggggatgacgtcaaatcagcacggcccttacgtccggggctacacacgtgttacaatggggggtacagaaggccgctacctggtgacaggatgccaatcccaaaaacctctctcagttcggatcgaagtctgcaacccgacttcgtgaagctggattcgctagtaatcgcgcatcagccatggcgcggtgaatacgttcccgggccttgtacacaccgcccgtcaagccatgaaagccgggggtacctgaagtacgtaaccgcaaggagc

SEQ ID NO: 335 - DNA, 1392 bp, Anaerostipes hadrus
  modified_base (1387)..(1387): a, c, t, g, unknown or other
tcgaacgaaacaccttatttgattttcttcggaactgaagatttggtgattgagtggcggacgggtgagtaacgcgtgggtaacctgccctgtacagggggataacagtcagaaatgactgctaataccgcataagaccacagcaccgcatggtgcaggggtaaaaactccggtggtacaggatggacccgcgtctgattagctggttggtgaggtaacggctcaccaaggcgacgatcagtagccggcttgagagagtgaacggccacattgggactgagacacggcccaaactcctacgggaggcagcagtggggaatattgcacaatgggggaaaccctgatgcagcgacgccgcgtgagtgaagaagtatctcggtatgtaaagctctatcagcagggaagaaaatgacggtacctgactaagaagccccggctaactacgtgccagcagccgcggtaatacgtagggggcaagcgttatccggaattactgggtgtaaagggtgcgtaggtggtatggcaagtcagaagtgaaaacccagggcttaactctgggactgcttttgaaactgtcagactggagtgcaggagaggtaagcggaattcctagtgtagcggtgaaatgcgtagatattaggaggaacatcagtggcgaaggcggcttactggactgaaactgacactgaggcacgaaagcgtggggagcaaacaggattagataccctggtagtccacgccgtaaacgatgaatactaggtgtcggggccgtagaggcttcggtgccgcagccaacgcagtaagtattccacctggggagtacgttcgcaagaatgaaactcaaaggaattgacggggacccgcacaagcggtggagcatgtggtttaattcgaagcaacgcgaagaaccttacctggtcttgacatccttctgaccggtccttaaccggacctttccttcgggacaggagtgacaggtggtgcatggttgtcgtcagctcgtgtcgtgagatgttgggttaagtcccgcaacgagcgcaacccctatctttagtagccagcatttcaggtgggcactctagagagactgccagggataacctggaggaaggtggggacgacgtcaaatcatcatgccccttatgaccagggctacacacgtgctacaatggcgtaaacagagggaagcagcctcgtgagagtgagcaaatcccaaaaataacgtctcagttcggattgtagtctgcaactcgactacatgaagctggaatcgctagtaatcgcgaatcagaatgtcgcggtgaatacgttcccgggtcttgtacacaccgcccgtcacaccatgggagtcagtaacgcccgaagtcagtgacccaaccgtaagganggagc

SEQ ID NO: 336 - DNA, 1419 bp, Staphylococcus epidermidis
  modified_base (1405)..(1405): a, c, t, g, unknown or other
  modified_base (1415)..(1418): a, c, t, g, unknown or other
gcagtcgagcgaacagacgaggagcttgctcctctgacgttagcggcggacgggtgagtaacacgtggataacctacctataagactgggataacttcgggaaaccggagctaataccggataatatattgaaccgcatggttcaatagtgaaagacggttttgctgtcacttatagatggatccgcgccgcattagctagttggtaaggtaacggcttaccaaggcaacgatgcgtagccgacctgagagggtgatcggccacactggaactgagacacggtccagactcctacgggaggcagcagtagggaatcttccgcaatgggcgaaagcctgacggagcaacgccgcgtgagtgatgaaggtcttcggatcgtaaaactctgttattagggaagaacaaatgtgtaagtaactatgcacgtcttgacggtacctaatcagaaagccacggctaactacgtgccagcagccgcggtaatacgtaggtggcaagcgttatccggaattattgggcgtaaagcgcgcgtaggcggttttttaagtctgatgtgaaagcccacggctcaaccgtggagggtcattggaaactggaaaacttgagtgcagaagaggaaagtggaattccatgtgtagcggtgaaatgcgcagagatatggaggaacaccagtggcgaaggcgactttctggtctgtaactgacgctgatgtgcgaaagcgtggggatcaaacaggattagataccctggtagtccacgccgtaaacgatgagtgctaagtgttagggggtttccgccccttagtgctgcagctaacgcattaagcactccgcctggggagtacgaccgcaaggttgaaactcaaaggaattgacggggacccgcacaagcggtggagcatgtggtttaattcgaagcaacgcgaagaaccttaccaaatcttgacatcctctgacccctctagagatagagttttccccttcgggggacagagtgacaggtggtgcatggttgtcgtcagctcgtgtcgtgagatgttgggttaagtcccgcaacgagcgcaacccttaagcttagttgccatcattaagttgggcactctaagttgactgccggtgacaaaccggaggaaggtggggatgacgtcaaatcatcatgccccttatgatttgggctacacacgtgctacaatggacaatacaaagggcagcgaaaccgcgaggtcaagcaaatcccataaagttgttctcagttcggattgtagtctgcaactcgactatatgaagctggaatcgctagtaatcgtagatcagcatgctacggtgaatacgttcccgggtcttgtacacaccgcccgtcacaccacgagagtttgtaacacccgaagccggtggagtaaccattnggagctagcnnnna

SEQ ID NO: 337 - DNA, 1393 bp, Coprococcus comes
  modified_base (8)..(8): a, c, t, g, unknown or other
  modified_base (28)..(28): a, c, t, g, unknown or other
  modified_base (1069)..(1069): a, c, t, g, unknown or other
gcagtcgnacgaagcacttatctttgantcttcggatgaagaggtttgtgactgagtggcggacgggtgagtaacgcgtgggtaacctgcctcatacagggggataacagttagaaatgactgctaataccgcataagaccacggagccgcatggctcagtgggaaaaactccggtggtatgagatggacccgcgtctgattaggtagttggtggggtaacggcctaccaagccaacgatcagtagccgacctgagagggtgaccggccacattgggactgagacacggcccaaactcctacgggaggcagcagtggggaatattgcacaatgggggaaaccctgatgcagcgacgccgcgtgagcgaagaagtatttcggtatgtaaagctctatcagcagggaagaaaatgacggtacctgactaagaagcaccggctaaatacgtgccagcagccgcggtaatacgtatggtgcaagcgttatccggatttactgggtgtaaagggagcgtagacggctgtgtaagtctgaagtgaaagcccggggctcaaccccgggactgctttggaaactatgcagctagagtgtcggagaggtaagtggaattcccagtgtagcggtgaaatgcgtagatattgggaggaacaccagtggcgaaggcggcttactggacgatgactgacgttgaggctcgaaagcgtggggagcaaacaggattagataccctggtagtccacgccgtaaacgatgactactaggtgtcggggagcaaagctcttcggtgccgcagcaaacgcaataagtagtccacctggggagtacgttcgcaagaatgaaactcaaaggaattgacggggacccgcacaagcggtggagcatgtggtttaattcgaagcaacgcgaagaaccttacctgctcttgacatcccggtgaccggcatgtaatgatgccttttcttcggaacaccggtgacaggtggtgcatggttgtcgtcagctcgtgtcgtgagatgttgggttaagtcccgcaacgagcgcaacccttatcttcagtagccagcatttnggatgggcactctggagagactgccagggataacctggaggaaggtggggatgacgtcaaatcatcatgccccttatgagcagggctacacacgtgctacaatggcgtaaacaaagggaagcgagcctgcgagggtaagcaaatctcaaaaataacgtctcagttcggattgtagtctgcaactcgactacatgaagctggaatcgctagtaatcgcgaatcagcatgtcgcggtgaatacgttcccgggtcttgtacacaccgcccgtcacaccatgggagttggtaacgcccgaagtcagtgacccaaccgtaaggagggag

SEQ ID NO: 338 - DNA, 1385 bp, Blautia obeum
  modified_base (13)..(13): a, c, t, g, unknown or other
agtcgaacggganccttttattgaagcttcggcagatttagctggtttctagtggcggacgggtgagtaacgcgtgggtaacctgccctatacagggggataacaaccagaaatggttgctaataccgcataagcgcacaggaccgcatggtccggtgtgaaaaactccggtggtataggatggacccgcgttggattagccagttggcagggtaacggcctaccaaagcgacgatccatagccggcctgagagggtgaacggccacattgggactgagacacggcccagactcctacgggaggcagcagtggggaatattgcacaatgggggaaaccctgatgcagcgacgccgcgtgaaggaagaagtatctcggtatgtaaacttctatcagcagggaagatagtgacggtacctgactaagaagccccggctaactacgtgccagcagccgcggtaatacgtagggggcaagcgttatccggatttactgggtgtaaagggagcgtagacggattagcaagtctgatgtgaaaggcaggggctcaacccctggactgcattggaaactgccagtcttgagtgccggagaggtaagcggaattcctagtgtagcggtgaaatgcgtagatattaggaggaacaccagtggcgaaggcggcttactggacggcaactgacgttgaggctcgaaagcgtggggagcaaacaggattagataccctggtagtccacgccgtaaacgatgaatactaggtgttggggagcaaagctcttcggtgccgccgcaaacgcattaagtattccacctggggagtacgttcgcaagaatgaaactcaaaggaattgacggggacccgcacaagcggtggagcatgtggtttaattcgaagcaacgcgaagaaccttaccaagtcttgacatccctctgaccgactcttaaccgagtctttccttcgggacaggggagacaggtggtgcatggttgtcgtcagctcgtgtcgtgagatgttgggttaagtcccgcaacgagcgcaacccctatccccagtagccagcagttcggctgggcactctgaggagactgccagggataacctggaggaaggcggggatgacgtcaaatcatcatgccccttatgatttgggctacacacgtgctacaatggcgtaaacaaagggaagcaagcctgcgagggtaagcaaatcccaaaaataacgtcccagttcggactgcagtctgcaactcgactgcacgaagctggaatcgctagtaatcgcggatcagaatgccgcggtgaatacgttcccgggtcttgtacacaccgcccgtcacaccatgggagtcagtaacgcccgaagtcagtgacctaaccgcaaggga

SEQ ID NO: 339 - DNA, 1395 bp, Eubacterium rectale
  modified_base (7)..(10): a, c, t, g, unknown or other
gcagtcnnnnaagcactttatttgatttccttcgggactgattattttgtgactgagtggcggacgggtgagtaacgcgtgggtaacctgccttgtacagggggataacagttggaaacggctgctaataccgcataagcgcacagcatcgcatgatgcagtgtgaaaaactccggtggtataagatggacccgcgttggattagctagttggtgaggtaacggcccaccaaggcgacgatccatagccgacctgagagggtgaccggccacattgggactgagacacggcccaaactcctacgggaggcagcagtggggaatattgcacaatgggcgaaagcctgatgcagcgacgccgcgtgagcgaagaagtatttcggtatgtaaagctctatcagcagggaagataatgacggtacctgactaagaagcaccggctaaatacgtgccagcagccgcggtaatacgtatggtgcaagcgttatccggatttactgggtgtaaagggagcgcaggcggtgcggcaagtctgatgtgaaagcccggggctcaaccccggtactgcattggaaactgtcgtactagagtgtcggaggggtaagcggaattcctagtgtagcggtgaaatgcgtagatattaggaggaacaccagtggcgaaggcggcttactggacgataactgacgctgaggctcgaaagcgtggggagcaaacaggattagataccctggtagtccacgccgtaaacgatgaatactaggtgttgggaagcattgcttctcggtgccgtcgcaaacgcagtaagtattccacctggggagtacgttcgcaagaatgaaactcaaaggaattgacggggacccgcacaagcggtggagcatgtggtttaattcgaagcaacgcgaagaaccttaccaagtcttgacatccttctgaccggtacttaaccgtaccttctcttcggagcaggagtgacaggtggtgcatggttgtcgtcagctcgtgtcgtgagatgttgggttaagtcccgcaacgagcgcaacccttatctttagtagccagcggttaggccgggcactctagagagactgccagggataacctggaggaaggcggggatgacgtcaaatcatcatgccccttatgacttgggctacacacgtgctacaatggcgtaaacaaagggaagcaaagctgtgaagccgagcaaatctcaaaaataacgtctcagttcggactgtagtctgcaacccgactacacgaagctggaatcgctagtaatcgcagatcagaatgctgcggtgaatacgttcccgggtcttgtacacaccgcccgtcacaccatgggagttgggaatgcccgaagccagtgacctaaccgaaaggaaggagc

SEQ ID NO: 340 - DNA, 1396 bp, Unknown
  Description of Unknown: Lachnospiraceae sp. FBI00033 sequence
  modified_base (9)..(9): a, c, t, g, unknown or other
  modified_base (19)..(22): a, c, t, g, unknown or other
  modified_base (28)..(30): a, c, t, g, unknown or other
  modified_base (48)..(48): a, c, t, g, unknown or other
  modified_base (525)..(525): a, c, t, g, unknown or other
  modified_base (1375)..(1375): a, c, t, g, unknown or other
tgcagtcgnacgaggtatnnnngattgnnnttttcggatggatttcangataccgagtggcggacgggtgagtaacgcgtgggtaacctgcctcatacagggggataacggttagaaatgactgctaataccgcataagcgcacagtaccgcatggtacggtgtgaaaaactccggtggtatgagatggacccgcgtctgattagctagttggtggggtaacggcccaccaaggcgacgatcagtagccgacctgagagggtgaccggccacattgggactgagacacggcccagactcctacgggaggcagcagtgggggatattgcacaatggaggaaactctgatgcagcgacgccgcgtgagtgaagaagtatttcggtatgtaaagctctatcagcagggaagaaaatgacggtacctgactaagaagccccggctaactacgtgccagcagccgcggtaatacgtagggggcaagcgttatccggatttactgggtgtaaagggagcgtagacggcgangcaagtctgaagtgaaatacccgggctcaacctgggaactgctttggaaactgtgttgctagagtgctggagaggtaagcggaattcctagtgtagcggtgaaatgcgtagatattaggaagaacaccagtggcgaaggcggcttactggacagtaactgacgttgaggctcgaaagcgtggggagcaaacaggattagataccctggtagtccacgccgtaaacgatgaatactaggtgttggtgagcaaagctcatcggtgccgccgcaaacgcaataagtattccacctggggagtacgttcgcaagaatgaaactcaaaggaattgacggggacccgcacaagcggtggagcatgtggtttaattcgaagcaacgcgaagaaccttaccaaatcttgacatccctctgaaaagcccttaatcgggttcctccttcgggacagaggtgacaggtggtgcatggttgtcgtcagctcgtgtcgtgagatgttgggttaagtcccgcaacgagcgcaacccctattgtcagtagccagcaggtaaagctgggcactctgatgagactgccagggataacctggaggaaggtggggatgacgtcaaatcatcatgccccttatgatttgggctacacacgtgctacaatggcgtaaacaaagagaagcgagcctgcgagggggagcaaatctcaaaaataacgtctcagttcggattgtagtctgcaactcgactacatgaagctggaatcgctagtaatcgcagatcagaatgctgcggtgaatacgttcccgggtcttgtacacaccgcccgtcacaccatgggagtcggaaatgcccgaagccagtnacccaagcgaaagcagggagc

SEQ ID NO: 341 - DNA, 1395 bp, Unknown
  Description of Unknown: Lachnospiraceae sp. FBI00071 sequence
  modified_base (4)..(4): a, c, t, g, unknown or other
  modified_base (22)..(22): a, c, t, g, unknown or other
tcgnacgaagcactttattacnatttcttcggaatgacgatttagtgactgagtggcggacgggtgagtaacgcgtgggtaacctgccttatacagggggataacagttagaaatgactgctaataccgcataagcgcacaggattgcatgatctggtgtgaaaaactccggtggtataagatggacccgcgtctgattagctggttggtgaggtaacggcccaccaaggcgacgatcagtagccgacctgagagggtgaccggccacattgggactgagacacggcccaaactcctacgggaggcagcagtggggaatattgcacaatgggggaaaccctgatgcagcgacgccgcgtgagcgaagaagtatttcggtatgtaaagctctatcagcagggaagaaaaaaaatgacggtacctgactaagaagccccggctaactacgtgccagcagccgcggtaatacgtagggggcaagcgttatccggatttactgggtgtaaagggagcgcaggcggtgcggcaagtctgatgtgaaagcccggggctcaaccccgggactgcattggaaactgtcgtacttgagtatcggagaggtaagtggaattcctagtgtagcggtgaaatgcgtagatattaggaggaacaccagtggcgaaggcggcttactggacgataactgacgctgaggctcgaaagcgtggggagcaaacaggattagataccctggtagtccacgccgtaaacgatgaatactaggtgtcgggggacatagtccttcggtgccgcagcaaacgcaataagtattccacctggggagtacgttcgcaagaatgaaactcaaaggaattgacggggacccgcacaagcggtggagcatgtggtttaattcgaagcaacgcgaagaaccttaccaagtcttgacatcccggtgacaaagtatgtaatgtactctttcttcggaacaccggtgacaggtggtgcatggttgtcgtcagctcgtgtcgtgagatgttgggttaagtcccgcaacgagcgcaacccctgttcttagtagccagcggttcggccgggcactctagggagactgccagggataacctggaggaaggcggggatgacgtcaaatcatcatgccccttatgacttgggctacacacgtgctacaatggcgtaaacaaagggaagcgaaaaggtgacttctagcaaatcccaaaaataacgtcccagttcggactgtagtctgcaactcgactacacgaagctggaatcgctagtaatcgcgaatcagaatgtcgcggtgaatacgttcccgggtcttgtacacaccgcccgtcacaccatgggagtcgggaatgcccgaagccggtgactcaaccgaaaggagagagc

SEQ ID NO: 342 - DNA, 1388 bp, Alistipes indistinctus
tcgaggggcagcgggtggagtatttcggtactcctgccggcgaccggcgcacgggtgcgtaacgcgtatgcaacctacctttaacagggggataatccgaagaaatttggtctaataccccataatatcatttaaggcatcttagatggttgaaaattccgatggttagagatgggcatgcgttgtattagctagttggtgaggtaacggctcaccaaggctacgatacatagggggactgagaggttttccccccacactggtactgagacacggaccagactcctacgggaggcagcagtgaggaatattggtcaatggacgcaagtctgaaccagccatgccgcgtgcaggatgaaggtgctatgcattgtaaactgcttttgtacgagggtaaatgcaggtacgtgtacctgtttgaaagtatcgtacgaataagggtcggctaactccgtgccagcagccgcggtaatacggaggacccgagcgttatccggatttattgggtttaaagggtgcgtaggcggattagtaagttagaggtgaaagctcgatgctcaacatcgaaattgcctctgatactgttagtctagagtatagttgcggaaggcggaatgtgtggtgtagcggtgaaatgcttagatatcacacagaacaccgattgcgaaggcagctttccaagctattactgacgctgatgcacgaaagcgtggggagcgaacaggattagataccctggtagtccacgccgtaaacgatgataactcgttgcaggcgatacacagtctgtgacttagcgaaagcgttaagttatccacctggggagtacgttcgcaagaatgaaactcaaaggaattgacgggggcccgcacaagcggaggaacatgtggtttaattcgatgatacgcgaggaaccttacccgggcttgaaagttagcgacggatcctgaaaggggtcttctcttcggagcgcgaaactaggtgctgcatggttgtcgtcagctcgtgccgtgaggtgtcgggttaagtcccataacgagcgcaacccctactgttagttaccagcacgtcaaggtgggcactctagcaggactgccggtgtaagccgagaggaaggtggggatgacgtcaaatcagcacggcccttacgtccggggcgacacacgtgttacaatggtcggtacagagggtcgctaccccgtgaggggatgccaatctcgaaagccgatctcagttcggattggaggctgaaactcgcctccatgaagttggattcgctagtaatcgcgcatcagccatggcgcggtgaatacgttcccgggccttgtacacaccgcccgtcaagccatgggagttgggggtgcctgaagtacgtgaccgcaaggagc

SEQ ID NO: 343 - DNA, 1399 bp, Sutterella massiliensis
gcagtcgaacggcagcacagggagcttgctcccgggtggcgagtggcgcacgggtgagtaatacatcggaacgtgtcctgttgtgggggataactgctcgaaagggtggctaataccgcatgagacctgagggtgaaagcgggggatcgcaagacctcgcgcaattggagcggccgatgcccgattagctagttggtgaggtaaaggctcaccaaggcgacgatcggtagctggtctgagaggacgaccagccacactgggactgagacacggcccagactcctacgggaggcagcagtggggaattttggacaatgggggcaaccctgatccagccatgccgcgtgcaggatgaaggccttcgggttgtaaactgcttttgtcagggacgaaaaggaccgtgttaataccatggtctgctgacggtacctgaagaataagcaccggctaactacgtgccagcagccgcggtaatacgtagggtgcaagcgttaatcggaattactgggcgtaaagcgtgcgcaggcggttctgtaagacagatgtgaaatccccgggctcaacctgggaattgcatttgtgactgcaggactagagttcatcagaggggggtggaattccaagtgtagcagtgaaatgcgtagatatttggaagaacaccaatggcgaaggcagccccctgggatgcgactgacgctcatgcacgaaagcgtggggagcaaacaggattagataccctggtagtccacgccctaaacgatgtctactggttgttggggttttttaaccttggtaacgaagctaacgcgtgaagtagaccgcctggggagtacggtcgcaagattaaaactcaaaggaattgacggggacccgcacaagcggtggatgatgtggattaattcgatgcaacgcgaaaaaccttacctagccttgacatgccaggaatcctgaagagattcgggagtgcccgcaagggaatctggacacaggtgctgcatggctgtcgtcagctcgtgtcgtgagatgttgggttaagtcccgcaacgagcgcaacccttgtcactagttgctacgcaagagcactctagtgagactgccggtgacaaaccggaggaaggtggggatgacgtcaagtcctcatggcccttatggctagggcctcacacgtcatacaatggtcggaacagagggcagcgaagccgcgaggtggagcaaatcccagaaaaccgatcgtagtccggattgcagtctgcaactcgactgcatgaagtcggaatcgctagtaatcgcggatcagcatgccgcggtgaatacgttcccgggtcttgtacacaccgcccgtcacaccatgggagtggggttcaccagaagacgtttgtttaaccgcaaggaggacggc

SEQ ID NO: 344 - DNA, 1391 bp, Alistipes putredinis
tgcagtcgaggggcagcataatggatagcaatatctatggtggcgaccggcgcacgggtgcgtaacgcgtatgcaacctacctttaacagggggataacactgagaaattggtactaataccccataatatcatagaaggcatcttttatggttgaaaattccgatggttagagatgggcatgcgttgtattagctagttggtggggtaacggctcaccaaggcgacgatacatagggggactgagaggttaaccccccacactggtactgagacacggaccagactcctacgggaggcagcagtgaggaatattggtcaatggacgcaagtctgaaccagccatgccgcgtgcaggatgacggctctatgagttgtaaactgcttttgtacgagggtaaacgcagatacgtgtatctgtctgaaagtatcgtacgaataaggatcggctaactccgtgccagcagccgcggtaatacggaggattcaagcgttatccggatttattgggtttaaagggtgcgtaggcggtttgataagttagaggtgaaatttcggggctcaaccctgaacgtgcctctaatactgttgagctagagagtagttgcggtaggcggaatgtatggtgtagcggtgaaatgcttagagatcatacagaacaccgattgcgaaggcagcttaccaaactatatctgacgttgaggcacgaaagcgtggggagcaaacaggattagataccctggtagtccacgcagtaaacgatgataactcgttgtcggcgatacacagtcggtgactaagcgaaagcgataagttatccacctggggagtacgttcgcaagaatgaaactcaaaggaattgacgggggcccgcacaagcggaggaacatgtggtttaattcgatgatacgcgaggaaccttacccgggcttgaaagttagcgacgattcttgaaagaggatttcccttcggggcgcgaaactaggtgctgcatggttgtcgtcagctcgtgccgtgaggtgtcgggttaagtcccataacgagcgcaacccctaccgttagttgccatcaggtgaagctgggcactctggcgggactgccggtgtaagccgagaggaaggtggggatgacgtcaaatcagcacggcccttacgtccggggctacacacgtgttacaatggtaggtacagagggcagctacccagcgatgggatgcgaatctcgaaagcctatctcagttcggattggaggctgaaacccgcctccatgaagttggattcgctagtaatcgcgcatcagccatggcgcggtgaatacgttcccgggccttgtacacaccgcccgtcaagccatgggagccgggggtgcctgaagttcgtgaccgcaaggagc

SEQ ID NO: 345 - DNA, 1392 bp, Roseburia inulinivorans
  modified_base (38)..(38): a, c, t, g, unknown or other
tcgaacgaagcacttttacagatttcttcggaatgaanttttagtgactgagtggcggacgggtgagtaacgcgtgggtaacctgcctcacacagggggataacagttggaaacggctgctaataccgcataagcgcacagtaccgcatggtacggtgtgaaaaactccggtggtgtgggatggacccgcgtctgattagctagttggcagggtaacggcctaccaaggcgacgatcagtagccgacctgagagggtgaccggccacattgggactgagacacggcccaaactcctacgggaggcagcagtggggaatattgcacaatgggggaaaccctgatgcagcgacgccgcgtgagcgaagaagtatttcggtatgtaaagctctatcagcagggaagaagaaatgacggtacctgactaagaagcaccggctaaatacgtgccagcagccgcggtaatacgtatggtgcaagcgttatccggatttactgggtgtaaagggagcgcaggcgggaggctaagtctgatgtgaaagcccggggctcaaccccggtactgcattggaaactggccacctagagtgtcggaggggtaagtggaattcctagtgtagcggtgaaatgcgtagatattaggaggaacaccagtggcgaaggcggcttactggacgattactgacgctgaggctcgaaagcgtggggagcaaacaggattagataccctggtagtccacgccgtaaacgatgaatactaggtgtcgggaggcattgcctttcggtgccgccgcaaacgcattaagtattccacctggggagtacgttcgcaagaatgaaactcaaaggaattgacggggacccgcacaagcggtggagcatgtggtttaattcgaagcaacgcgaagaaccttaccaagtcttgacatcccgatgacagagtatgtaatgtactttctcttcggagcatcggtgacaggtggtgcatggttgtcgtcagctcgtgtcgtgagatgttgggttaagtcccgcaacgagcgcaacccttatcctcagtagccagcagttaggctgggcactctgtggagactgccagggataacctggaggaaggtggggatgacgtcaaatcatcatgccccttatgacttgggctacacacgtgctacaatggcgtaaacaaagggaagcgagaccgcgaggtggagcaaatcccaaaaataacgtctcagttcggactgtagtctgcaacccgactacacgaagctggaatcgctagtaatcgcagatcagaatgctgcggtgaatacgttcccgggtcttgtacacaccgcccgtcacaccatgggagttggaaatgcccgaagtcagtgacccaaccgcaaggagggagc

SEQ ID NO: 346 - DNA, 1360 bp, Unknown
  Description of Unknown: Coriobacteriia sp. FBI00346 sequence
  modified_base (1359)..(1359): a, c, t, g, unknown or other
tgcagtcgaacggttaaaccgccttcgggcggacatacagtggcgaacgggtgagtaacacgtgaccaacctgccccgcgctccgggacaacctcgggaaaccgaggctaataccggatgcgccgcccgccccgcatggggcgggcgggaaagccgagacggcgcgggatggggtcgcggcccatcaggtagacggcgggatgagagcccaccgtgcctgcgacgggtagccggcctgagagggcgatcggccacattgggactgagatacggcccagactcctacgggaggcagcagtggggaattttgcgcaatgggggaaaccctgacgcagcaacgccgcgtgcgggacgaaggccttcgggttgtaaaccgctttcagcagggaagacatcgacggtacctgcagaagaagccccggctaactacgtgccagcagccgcggtaacacgtagggggcgagcgttatccggattcattgggcgtaaagcgcgcgtaggcggccgctcaagcgggacctctaatcccggggctcaaccccgggccgggtcccgaactgggcggctcgagtcaggtagaggcaggcggaattcccggtgtagcggtgaaatgcgcagatatcgggaagaacaccgatggcgaaggcagcctgctgggccttgactgacgctgaggcgcgaaagccgggggagcgaacaggattagataccctggtagtcccggccgtaaacgatgggcgctaggtgtggggagggtcgtcctctccgtgccgcagccaacgcattaagcgccccgcctggggagtacggccgcaaggctaaaactcaaaggaattgacgggggcccgcacaagcagcggagcatgtggcttaattcgaagcaacgcgaagaaccttaccagggcttgacatgctagtgaagcggcggagacgccgtggccgagaggagctagcgcaggtggtgcatggctgtcgtcagctcgtgtcgtgagatgttgggttaagtcccgcaacgagcgcaacccctgccccgtgttgccagcattcagttggggactcgcgggggactgccggcgtcaagccggaggaaggtggggacgacgtcaagtcatcatgccccttatgccctgggctgcacacgtgctacaatggccggtacagcgggctgcgaccaggcgactggaagcgaatcccacaaagccggccccagttcggaccggaggctgcaacccgcctccgcgaagtcggagttgctagtaatcgcggatcagcatgccgcggtgaatacgttcccgggccttgtacacaccgcccgtcacaccacccgagtcgtctgcacccgaagccgccggccgaacnt

SEQ ID NO: 347 - DNA, 1368 bp, Bacteroides uniformis
  modified_base (1367)..(1367): a, c, t, g, unknown or other
ctgtgctaagtgttgatggcgaccggcgcacgggtgagtaacacgtatccaacctgccgatgactcggggatagcctttcgaaagaaagattaatacccgatggcatagttcttccgcatggtagaactattaaagaatttcggtcatcgatggggatgcgttccattaggttgttggcggggtaacggcccaccaagccttcgatggataggggttctgagaggaaggtcccccacattggaactgagacacggtccaaactcctacgggaggcagcagtgaggaatattggtcaatggacgagagtctgaaccagccaagtagcgtgaaggatgactgccctatgggttgtaaacttcttttatacgggaataaagtgaggcacgtgtgcctttttgtatgtaccgtatgaataaggatcggctaactccgtgccagcagccgcggtaatacggaggatccgagcgttatccggatttattgggtttaaagggagcgtaggcggacgcttaagtcagttgtgaaagtttgcggctcaaccgtaaaattgcagttgatactgggtgtcttgagtacagtagaggcaggcggaattcgtggtgtagcggtgaaatgcttagatatcacgaagaactccgattgcgaaggcagcttgctggactgtaactgacgctgatgctcgaaagtgtgggtatcaaacaggattagataccctggtagtccacacagtaaacgatgaatactcgctgtttgcgatatacagtaagcggccaagcgaaagcgttaagtattccacctggggagtacgccggcaacggtgaaactcaaaggaattgacgggggcccgcacaagcggaggaacatgtggtttaattcgatgatacgcgaggaaccttacccgggcttgaattgcaactgaatgatgtggagacatgtcagccgcaaggcagttgtgaaggtgctgcatggttgtcgtcagctcgtgccgtgaggtgtcggcttaagtgccataacgagcgcaacccttatcgatagttaccatcaggttatgctggggactctgtcgagactgccgtcgtaagatgtgaggaaggtggggatgacgtcaaatcagcacggcccttacgtccggggctacacacgtgttacaatggggggtacagaaggcagctacacggcgacgtgatgctaatcccgaaagcctctctcagttcggattggagtctgcaacccgactccatgaagctggattcgctagtaatcgcgcatcagccacggcgcggtgaatacgttcccgggccttgtacacaccgcccgtcaagccatgaaagccgggggtacctgaagtgcgtaaccgcaaggagcnc

SEQ ID NO: 348 - DNA, 1364 bp, Parabacteroides merdae
  modified_base (4)..(4): a, c, t, g, unknown or other
  modified_base (6)..(7): a, c, t, g, unknown or other
acananngatggcgaccggcgcacggggtgagtaacgcgtatgcaacttacctatcagagggggatagcccggcgaaagtcggattaataccccataaaacaggggtcccgcatgggaatatttgttaaagattcatcgctgatagataggcatgcgttccattaggcagttggcggggtaacggcccaccaaaccgacgatggataggggttctgagaggaaggtcccccacattggtactgagacacggaccaaactcctacgggaggcagcagtgaggaatattggtcaatggccgagaggctgaaccagccaagtcgcgtgaaggaagaaggatctatggtttgtaaacttcttttataggggaataaagtggaggacgtgtccttttttgtatgtaccctatgaataagcatcggctaactccgtgccagcagccgcggtaatacggaggatgcgagcgttatccggatttattgggtttaaagggtgcgtaggtggtgatttaagtcagcggtgaaagtttgtggctcaaccataaaattgccgttgaaactgggttacttgagtgtgtttgaggtaggcggaatgcgtggtgtagcggtgaaatgcatagatatcacgcagaactccgattgcgaaggcagcttactaaaccataactgacactgaagcacgaaagcgtggggatcaaacaggattagataccctggtagtccacgcagtaaacgatgattactaggagtttgcgatacaatgtaagctctacagcgaaagcgttaagtaatccacctggggagtacgccggcaacggtgaaactcaaaggaattgacgggggcccgcacaagcggaggaacatgtggtttaattcgatgatacgcgaggaaccttacccgggtttgaacgtagtctgaccggagtggaaacactccttctagcaatagcagattacgaggtgctgcatggttgtcgtcagctcgtgccgtgaggtgtcggcttaagtgccataacgagcgcaacccttatcactagttactaacaggtgaagctgaggactctggtgagactgccagcgtaagctgtgaggaaggtggggatgacgtcaaatcagcacggcccttacatccggggcgacacacgtgttacaatggcatggacaaagggcagctacctggcgacaggatgctaatctccaaaccatgtctcagttcggatcggagtctgcaactcgactccgtgaagctggattcgctagtaatcgcgcatcagccatggcgcggtgaatacgttcccgggccttgtacacaccgcccgtcaagccatgggagccgggggtacctgaagtccgtaaccgcaaggatc

SEQ ID NO: 349 - DNA, 1400 bp, Unknown
  Description of Unknown: Holdemanella biformis sequence
  modified_base (2)..(3): a, c, t, g, unknown or other
  modified_base (9)..(9): a, c, t, g, unknown or other
gnnagtcgnacgagaggaaggaaagcttgctttcctaaatctagtggcgaacgggtgagtaacacgtaggtaacctgcccatgtgcccgggataacttctggaaacggatgctaaaaccggataggtagcagacaagcatttgactgctattaaagtggctaaggccatgaacatggatggacctgcggtgcattagctagttggtgaggtaacggcccaccaaggcgacgatgcatagccggcctgagagggcggacggccacattgggactgagacacggcccaaactcctacgggaggcagcagtagggaattttcgtcaatggggggaaccctgaacgagcaatgccgcgtgagtgaggaaggtcttcggatcgtaaagctctgttgtaagagaaaaacggcactcatagggaatgatgagtgagtgatggtatcttaccagaaagtcacggctaactacgtgccagcagccgcggtaatacgtaggtggcgagcgttatccggaatgattgggcgtaaagggtgcgtaggtggcagatcaagtctggagtaaaaggtatgggctcaacccgtacttgctctggaaactgatcagctagagaacagaagaggacggcggaactccatgtgtagcggtaaaatgcgtagatatatggaagaacaccggtggcgaaggcggccgtctggtctggattctgacactgaagcacgaaagcgtggggagcaaataggattagataccctagtagtccacgccgtaaacgatgagaactaggtgttgggggaataactcagtgccgcagttaacgcaataagttctccgcctggggagtatgcacgcaagtgtgaaactcaaaggaattgacgggggcccgcacaagcggtggagtatgtggtttaattcgaagcaacgcgaagaaccttaccaggccttgacatcccttgcagaggtatagagatatatccgaggttatcaaggagacaggtggtgcatggttgtcgtcagctcgtgtcgtgagatgttgggttaagtcccgcaacgagcgcaacccttgtgatatgttactaacattgagttgaggactcatatcagactgccggtgataaaccggaggaaggtggggatgacgtcaaatcatcatgccccttatggcctgggctacacacgtactacaatggcgtctacaaagagcggcaagcctgtgaaggcaagcgaatctcataaaggacgtctcagttcggattgaagtctgcaacccgacttcatgaagctggaatcgctagtaatcgcgaatcagcatgtcgcggtgaatacgttctcgggccttgtacacaccgcccgtcaaaccatgggagttggtaatgcccgaagccggtggcataacccttcggggag

SEQ ID NO: 350 - DNA, 1387 bp, Alistipes putredinis
tcgaggggcagcataatggatagcaatatctatggtggcgaccggcgcacgggtgcgtaacgcgtatgcaacctacctttaacagggggataacactgagaaattggtactaataccccataatatcatagaaggcatcttttatggttgaaaattccgatggttagagatgggcatgcgttgtattagctagttggtggggtaacggctcaccaaggcgacgatacatagggggactgagaggttaaccccccacactggtactgagacacggaccagactcctacgggaggcagcagtgaggaatattggtcaatggacgcaagtctgaaccagccatgccgcgtgcaggatgacggctctatgagttgtaaactgcttttgtacgagggtaaacgcagatacgtgtatctgtctgaaagtatcgtacgaataaggatcggctaactccgtgccagcagccgcggtaatacggaggattcaagcgttatccggatttattgggtttaaagggtgcgtaggcggtttgataagttagaggtgaaatttcggggctcaaccctgaacgtgcctctaatactgttgagctagagagtagttgcggtaggcggaatgtatggtgtagcggtgaaatgcttagagatcatacagaacaccgattgcgaaggcagcttaccaaactatatctgacgttgaggcacgaaagcgtggggagcaaacaggattagataccctggtagtccacgcagtaaacgatgataactcgttgtcggcgatacacagtcggtgactaagcgaaagcgataagttatccacctggggagtacgttcgcaagaatgaaactcaaaggaattgacgggggcccgcacaagcggaggaacatgtggtttaattcgatgatacgcgaggaaccttacccgggcttgaaagttagcgacgattcttgaaagaggatttcccttcggggcgcgaaactaggtgctgcatggttgtcgtcagctcgtgccgtgaggtgtcgggttaagtcccataacgagcgcaacccctaccgttagttgccatcaggtgaagctgggcactctggcgggactgccggtgtaagccgagaggaaggtggggatgacgtcaaatcagcacggcccttacgtccggggctacacacgtgttacaatggtaggtacagagggcagctacccagcgatgggatgcgaatctcgaaagcctatctcagttcggattggaggctgaaacccgcctccatgaagttggattcgctagtaatcgcgcatcagccatggcgcggtgaatacgttcccgggccttgtacacaccgcccgtcaagccatgggagccgggggtgcctgaagttcgtgaccgcaaggagcg

SEQ ID NO: 351 - DNA, 1401 bp, Alistipes obesi
  modified_base (5)..(5): a, c, t, g, unknown or other
  modified_base (29)..(29): a, c, t, g, unknown or other
  modified_base (32)..(33): a, c, t, g, unknown or other
  modified_base (106)..(106): a, c, t, g, unknown or other
gtgcngtcgaggggcagcataatggtagntannactattgatggcgaccggcggacgggtgcgtaacgcgtatgcaacctgccctttacagggggataacactganaaatcggtactaataccccataatattccgggaggcatctttcggagttgaaagctttggtggtaaaggatgggcatgcgttgtattagctagttggtaaggtaacggcttaccaaggcgacgatacatagggggactgagaggttaaccccccacattggtactgagacacggaccaaactcctacgggaggcagcagtgaggaatattggtcaatggacggaagtctgaaccagccatgccgcgtgcaggaagacggctctatgagttgtaaactgcttttgtacgagggtaaacgcagatacgtgtatctgcctgaaagtatcgtacgaataaggatcggctaactccgtgccagcagccgcggtaatacggaggatccaagcgttatccggatttattgggtttaaagggtgcgtaggcggtttagtaagtcagcggtgaaattttggtgcttaacaccaaacgtgccgttgatactgctgggctagagagtagttgcggtaggcggaatgtatggtgtagcggtgaaatgcttagagatcatacagaacaccgattgcgaaggcagcttaccaaactatatctgacgttgaggcacgaaagcgtggggagcaaacaggattagataccctggtagtccacgcagtaaacgatgatagctcgttgtcggcgatacacagtcggtgactaagagaaatcgataagctatccacctggggagtacgttcgcaagaatgaaactcaaaggaattgacgggggcccgcacaagcggaggaacatgtggtttaattcgatgatacgcgaggaaccttacccgggcttgaaagttactgacgattctggaaacaggatttcccttcggggcaggaaactaggtgctgcatggttgtcgtcagctcgtgccgtgaggtgtcgggttaagtcccataacgagcgcaacccctactgatagttgccatcagagcgtttgagcgatcaaacaagctgggcactctatcgggactgccggtgtaagccgagaggaaggtggggatgacgtcaaatcagcacggcccttacgtccggggcgacacacgtgttacaatggtaggtacagagggcagccacccagtgatggggagcgaatctcgaaagcctatctcagttcggattggaggctgaaactcgcctccatgaagttggattcgctagtaatcgcgcatcagccatggcgcggtgaatacgttcccgggccttgtacacaccgcccgtcaagccatgggagttgggggtgcctgaagttcgtgaccga

SEQ ID NO: 352 - DNA, 1369 bp, Collinsella aerofaciens
  modified_base (1363)..(1367): a, c, t, g, unknown or other
tgcagtcgaacggcacctatcttcggatagaagcgagtggcgaacggctgagtaacacgtggagaacctgccccctcccccgggatagccgcccgaaaggacgggtaataccggataccccggggtgccgcatggcgccccggctaaagccccgacgggaggggatggctccgcggcccatcaggtagacggcggggtgacggcccaccgtgccgacaacgggtagccgggttgagagaccgaccggccagattgggactgagacacggcccagactcctacgggaggcagcagtggggaatcttgcgcaatggggggaaccctgacgcagcgacgccgcgtgcgggacggaggccttcgggtcgtaaaccgctttcagcagggaagagtcaagactgtacctgcagaagaagccccggctaactacgtgccagcagccgcggtaatacgtagggggcgagcgttatccggattcattgggcgtaaagcgcgcgtaggcggcccggcaggccgggggtcgaagcggggggctcaaccccccgaagcccccggaacctccgcggcttgggtccggtaggggagggtggaacacccggtgtagcggtggaatgcgcagatatcgggtggaacaccggtggcgaaggcggccctctgggccgagaccgacgctgaggcgcgaaagctgggggagcgaacaggattagataccctggtagtcccagccgtaaacgatggacgctaggtgtggggggacgatccccccgtgccgcagccaacgcattaagcgtcccgcctggggagtacggccgcaaggctaaaactcaaaggaattgacgggggcccgcacaagcagcggagcatgtggcttaattcgaagcaacgcgaagaaccttaccagggcttgacatatgggtgaagcgggggagaccccgtggccgagaggagcccatacaggtggtgcatggctgtcgtcagctcgtgtcgtgagatgttgggttaagtcccgcaacgagcgcaacccccgccgcgtgttgccatcgggtgatgccgggaacccacgcgggaccgccgccgtcaaggcggaggagggcggggacgacgtcaagtcatcatgccccttatgccctgggctgcacacgtgctacaatggccggtacagagggatgccaccccgcgagggggagcggatcccggaaagccggccccagttcggattgggggctgcaacccgcccccatgaagtcggagttgctagtaatcgcggatcagcatgccgcggtgaatgcgttcccgggccttgtacacaccgcccgtcacaccacccgagtcgtctgcacccgaagtcgccggcccaaccgagagnnnnngg

SEQ ID NO: 353 - DNA, 1389 bp, Bifidobacterium adolescentis
  modified_base (1375)..(1375): a, c, t, g, unknown or other
tgcaagtcgaacgggatcccaggagcttgctcctgggtgagagtggcgaacgggtgagtaatgcgtgaccgacctgccccatacaccggaatagctcctggaaacgggtggtaatgccggatgctccgattggatgcatgtccttccgggaaagattcatcggtatgggatggggtcgcgtcctatcagcttgatggcggggtaacggcccaccatggcttcgacgggtagccggcctgagagggcgaccggccacattgggactgagatacggcccagactcctacgggaggcagcagtggggaatattgcacaatgggcgcaagcctgatgcagcgacgccgcgtgcgggatgacggccttcggttgtaaaccgcttttgactgggagcaagcccttcggggtgagtgtacctttcgaataagcaccggctaactacgtgccagcagccgcggtaatacgtagggtgcaagcgttatccggaattattgggcgtaaagggctcgtaggcggttcgtcgcgtccggtgtgaaagtccatcgcttaacggtggatccgcgccgggtacgggcgggcttgagtgcggtaggggagactggaattcccggtgtaacggtggaatgtgtagatatcgggaagaacaccaatggcgaaggcaggtctctgggccgtcactgacgctgaggagcgaaagcgtggggagcgaacaggattagataccctggtagtccacgccgtaaacggtggatgctggatgtggggaccattccacggtctccgtgtcggagccaacgcgttaagcatcccgcctggggagtacggccgcaaggctaaaactcaaagaaattgacgggggcccgcacaagcggcggagcatgcggattaattcgatgcaacgcgaagaaccttacctgggcttgacatgttcccgacagccccagagatggggcctcccttcggggcgggttcacaggtggtgcatggtcgtcgtcagctcgtgtcgtgagatgttgggttaagtcccgcaacgagcgcaaccctcgccctgtgttgccagcacgtcgtggtgggaactcacgggggaccgccggggtcaactcggaggaaggtggggatgacgtcagatcatcatgccccttacgtccagggcttcacgcatgctacaatggccggtacaacgggatgcgacaccgcgaggtggagcggatcccttaaaaccggtctcagttcggattggagtctgcaacccgactccatgaaggcggagtcgctagtaatcgcggatcagcaacgccgcggtgaatgcgttcccgggccttgtacacaccgcccgtcaagtcatgaaagtgggtagcacccgaagccggtggcccancctttttgggggga

SEQ ID NO: 354 - DNA, 1379 bp, Bifidobacterium adolescentis
  modified_base (1374)..(1374): a, c, t, g, unknown or other
tgcagtcgaacgggatcccaggagcttgctcctgggtgagagtggcgaacgggtgagtaatgcgtgaccgacctgccccatacaccggaatagctcctggaaacgggtggtaatgccggatgctccgactggatgcatgtcctgccgggaaagattcatcggtatgggatggggtcgcgtcctatcagcttgatggcggggtaacggcccaccatggcttcgacgggtagccggcctgagagggcgaccggccacattgggactgagatacggcccagactcctacgggaggcagcagtggggaatattgcacaatgggcgcaagcctgatgcagcgacgccgcgtgcgggatgacggccttcggttgtaaaccgcttttgactgggagcaagcccttcggggtgagtgtacctttcgaataagcaccggctaactacgtgccagcagccgcggtaatacgtagggtgcaagcgttatccggaattattgggcgtaaagggctcgtaggcggttcgtcgcgtccggtgtgaaagtccatcgcttaacggtggatccgcgccgggtacgggcgggcttgagtgcggtaggggagactggaattcccggtgtaacggtggaatgtgtagatatcgggaagaacaccaatggcgaaggcaggtctctgggccgtcactgacgctgaggagcgaaagcgtggggagcgaacaggattagataccctggtagtccacgccgtaaacggtggatgctggatgtggggaccattccacggtctccgtgtcggagccaacgcgttaagcatcccgcctggggagtacggccgcaaggctaaaactcaaagaaattgacgggggcccgcacaagcggcggagcatgcggattaattcgatgcaacgcgaagaaccttacctgggcttgacatgttcccgacagccccagagatggggcctcccttcggggcgggttcacaggtggtgcatggtcgtcgtcagctcgtgtcgtgagatgttgggttaagtcccgcaacgagcgcaaccctcgccctgtgttgccagcacgtcgtggtgggaactcacgggggaccgccggggtcaactcggaggaaggtggggatgacgtcagatcatcatgccccttacgtccagggcttcacgcatgctacaatggccggtacaacgggatgcgacaccgcgaggtggagcggatcccttaaaaccggtctcagttcggattggagtctgcaacccgactccatgaaggcggagtcgctagtaatcgcggatcagcaacgccgcggtgaatgcgttcccgggccttgtacacaccgcccgtcaagtcatgaaagtgggtagcacccgaagccggtggcccanccttt

SEQ ID NO: 355 - DNA, 1395 bp, Blautia massiliensis
  modified_base (4)..(5): a, c, t, g, unknown or other
  modified_base (17)..(23): a, c, t, g, unknown or other
  modified_base (33)..(33): a, c, t, g, unknown or other
  modified_base (40)..(40): a, c, t, g, unknown or other
  modified_base (956)..(956): a, c, t, g, unknown or other
  modified_base (1376)..(1376): a, c, t, g, unknown or other
  modified_base (1394)..(1394): a, c, t, g, unknown or other
tgcnngtcgaacgggannnnnnnattattgaancttcggncgatttagattgtttctagtggcggacgggtgagtaacgcgtgggtaacctgccttatacagggggataacagtcagaaatgactgctaataccgcataagcgcacagaactgcatggctcggtgtgaaaaactccggtggtataagatggacccgcgttggattagctagttggtgaggtaacggcccaccaaggcgacgatccatagccggcctgagagggtgaacggccacattgggactgagacacggcccagactcctacgggaggcagcagtggggaatattgcacaatgggggaaaccctgatgcagcgacgccgcgtgaaggaagaagtatctcggtatgtaaacttctatcagcagggaagaaaatgacggtacctgactaagaagccccggctaactacgtgccagcagccgcggtaatacgtagggggcaagcgttatccggatttactgggtgtaaagggagcgtagacggatggacaagtctgatgtgaaaggctggggctcaaccccgggactgcattggaaactgcccgtcttgagtgccggagaggtaagcggaattcctagtgtagcggtgaaatgcgtagatattaggaggaacaccagtggcgaaggcggcttactggacggtaactgacgttgaggctcgaaagcgtggggagcaaacaggattagataccctggtagtccacgcggtaaacgatgaatgctaggtgtcggggagcaaagctcttcggtgccgccgcaaacgcattaagcattccacctggggagtacgttcgcaagaatgaaactcaaaggaattgacggggacccgcacaagcggtggagcatgtggtttaattcgaagcaacgcgaagaaccttaccaagtcttgacatccctctgaccgactcttaaccgantctttccttcgggacagaggagacaggtggtgcatggttgtcgtcagctcgtgtcgtgagatgttgggttaagtcccgcaacgagcgcaacccctatccccagtagccagcgtttaggccgggcactctgaggagactgccagggataacctggaggaaggcggggatgacgtcaaatcatcatgccccttatgatttgggctacacacgtgctacaatggcgtaaacaaagggaagcgaacctgcgagggtgggcaaatcccaaaaataacgtcccagttcggactgtagtctgcaacccgactacacgaagctggaatcgctagtaatcgcggatcagaatgccgcggtgaatacgttcccgggtcttgtacacaccgcccgtcacaccatgggagtcagtaacgcccgaagtcagtnacctaaccgcaaggaagna

SEQ ID NO: 356 - DNA, 1408 bp, Eubacterium eligens
  modified_base (2)..(3): a, c, t, g, unknown or other
  modified_base (5)..(5): a, c, t, g, unknown or other
  modified_base (15)..(15): a, c, t, g, unknown or other
  modified_base (27)..(28): a, c, t, g, unknown or other
  modified_base (30)..(30): a, c, t, g, unknown or other
  modified_base (34)..(34): a, c, t, g, unknown or other
  modified_base (40)..(40): a, c, t, g, unknown or other
  modified_base (48)..(48): a, c, t, g, unknown or other
  modified_base (50)..(50): a, c, t, g, unknown or other
  modified_base (59)..(60): a, c, t, g, unknown or other
anncntgcagtcgancgaagcatttannanacangattancttcggtntntgaagttcnnttatgactgagtggcggacgggtgagtaacgcgtgggtaacctgccttgtactgggggatagcagctggaaacggctggtaataccgcataagcgcacaatgttgcatgacatggtgtgaaaaactccggtggtataagatggacccgcgtctgattagctagttggtgagataacagcccaccaaggcgacgatcagtagccgacctgagagggtgaccggccacattgggactgagacacggcccagactcctacgggaggcagcagtggggaatattgcacaatggaggaaactctgatgcagcgacgccgcgtgagtgaagaagtaattcgttatgtaaagctctatcagcagggaagatagtgacggtacctgactaagaagctccggctaaatacgtgccagcagccgcggtaatacgtatggagcaagcgttatccggatttactgggtgtaaagggagtgtaggtggccatgcaagtcagaagtgaaaatccggggctcaaccccggaactgcttttgaaactgtaaggctggagtgcaggaggggtgagtggaattcctagtgtagcggtgaaatgcgtagatattaggaggaacaccagtggcgaaggcggctcactggactgtaactgacactgaggctcgaaagcgtggggagcaaacaggattagataccctggtagtccacgccgtaaacgatgaatactaggtgtcggggcccataagggcttcggtgccgcagcaaacgcaataagtattccacctggggagtacgttcgcaagaatgaaactcaaaggaattgacggggacccgcacaagcggtggagcatgtggtttaattcgaagcaacgcgaagaaccttaccaagtcttgacatcccactgaccggacagtaatgtgtcctttccttcgggacagtggtgacaggtggtgcatggttgtcgtcagctcgtgtcgtgagatgttgggttaagtcccgcaacgagcgcaacccctatccttagtagccagcagtaagatgggcactctagggagactgccagggataacctggaggaaggtggggatgacgtcaaatcatcatgccccttatgacttgggctacacacgtgctacaatggcgtaaacaaagtgaagcgaagtcgtgaggccaagcaaatcacaaaaataacgtctcagttcggattgtagtctgcaactcgactacatgaagctggaatcgctagtaatcgcagatcagaatgctgcggtgaatacgttcccgggtcttgtacacaccgcccgtcacaccatgggagtcgaaaatgcccgaagtcggtgacctaacgaaagaaggagcc

SEQ ID NO: 357 - DNA, 1392 bp, Unknown
  Description of Unknown: Bacteroides kribbi / Bacteroides koreensis species cluster sequence
  modified_base (1390)..(1390): a, c, t, g, unknown or other
tgcagtcgaggggcagcattttagtttgcttgcaaactgaagatggcgaccggcgcacgggtgagtaacacgtatccaacctgccgataactccggaatagcctttcgaaagaaagattaataccggatggtatacgaatatcgcatgatatttttattaaagaatttcggttatcgatggggatgcgttccattagtttgttggcggggtaacggcccaccaagactacgatggataggggttctgagaggaaggtcccccacattggaactgagacacggtccaaactcctacgggaggcagcagtgaggaatattggtcaatgggcgagagcctgaaccagccaagtagcgtgaaggatgaaggctctatgggtcgtaaacttcttttatatgggaataaagttttccacgtgtggaattttgtatgtaccatatgaataaggatcggctaactccgtgccagcagccgcggtaatacggaggatccgagcgttatccggatttattgggtttaaagggagcgtaggtggattgttaagtcagttgtgaaagtttgcggctcaaccgtaaaattgcagttgaaactggcagtcttgagtacagtagaggtgggcggaattcgtggtgtagcggtgaaatgcttagatatcacgaagaactccgattgcgaaggcagctcactagactgttactgacactgatgctcgaaagtgtgggtatcaaacaggattagataccctggtagtccacacagtaaacgatgaatactcgctgtttgcgatatacagtaagcggccaagcgaaagcattaagtattccacctggggagtacgccggcaacggtgaaactcaaaggaattgacgggggcccgcacaagcggaggaacatgtggtttaattcgatgatacgcgaggaaccttacccgggcttaaattgcaacagaatatattggaaacagtatagccgtaaggctgttgtgaaggtgctgcatggttgtcgtcagctcgtgccgtgaggtgtcggcttaagtgccataacgagcgcaacccttatctttagttactaacaggtcatgctgaggactctagagagactgccgtcgtaagatgtgaggaaggtggggatgacgtcaaatcagcacggcccttacgtccggggctacacacgtgttacaatggggggtacagaaggcggctacctggtgacaggatgctaatcccaaaaacctctctcagttcggatcgaagtctgcaacccgacttcgtgaagctggattcgctagtaatcgcgcatcagccatggcgcggtgaatacgttcccgggccttgtacacaccgcccgtcaagccatgaaagccgggggtacctgaagtacgtaaccgcaagnag

SEQ ID NO: 358 - DNA, 1243 bp, Eubacterium hallii
  modified_base (1)..(16): a, c, t, g, unknown or other
  modified_base (19)..(21): a, c, t, g, unknown or other
  modified_base (25)..(25): a, c, t, g, unknown or other
  modified_base (27)..(30): a, c, t, g, unknown or other
  modified_base (33)..(33): a, c, t, g, unknown or other
  modified_base (38)..(38): a, c, t, g, unknown or other
  modified_base (41)..(41): a, c, t, g, unknown or other
  modified_base (44)..(45): a, c, t, g, unknown or other
  modified_base (55)..(56): a, c, t, g, unknown or other
  modified_base (74)..(74): a, c, t, g, unknown or other
  modified_base (84)..(85): a, c, t, g, unknown or other
  modified_base (112)..(112): a, c, t, g, unknown or other
  modified_base (126)..(126): a, c, t, g, unknown or other
  modified_base (129)..(129): a, c, t, g, unknown or other
  modified_base (140)..(140): a, c, t, g, unknown or other
  modified_base (159)..(159): a, c, t, g, unknown or other
  modified_base (195)..(195): a, c, t, g, unknown or other
  modified_base (248)..(248): a, c, t, g, unknown or other
  modified_base (259)..(259): a, c, t, g, unknown or other
  modified_base (310)..(311): a, c, t, g, unknown or other
  modified_base (322)..(322): a, c, t, g, unknown or other
  modified_base (594)..(594): a, c, t, g, unknown or other
  modified_base (931)..(932): a, c, t, g, unknown or other
  modified_base (956)..(958): a, c, t, g, unknown or other
  modified_base (981)..(981): a, c, t, g, unknown or other
  modified_base (983)..(983): a, c, t, g, unknown or other
  modified_base (986)..(986): a, c, t, g, unknown or other
  modified_base (988)..(988): a, c, t, g, unknown or other
  modified_base (993)..(996): a, c, t, g, unknown or other
  modified_base (1019)..(1020): a, c, t, g, unknown or other
  modified_base (1023)..(1023): a, c, t, g, unknown or other
  modified_base (1028)..(1028): a, c, t, g, unknown or other
  modified_base (1031)..(1032): a, c, t, g, unknown or other
  modified_base (1035)..(1035): a, c, t, g, unknown or other
  modified_base (1045)..(1045): a, c, t, g, unknown or other
  modified_base (1054)..(1057): a, c, t, g, unknown or other
  modified_base (1063)..(1065): a, c, t, g, unknown or other
  modified_base (1068)..(1068): a, c, t, g, unknown or other
  modified_base (1072)..(1072): a, c, t, g, unknown or other
  modified_base (1075)..(1075): a, c, t, g, unknown or other
  modified_base (1080)..(1082): a, c, t, g, unknown or other
  modified_base (1087)..(1087): a, c, t, g, unknown or other
  modified_base (1096)..(1097): a, c, t, g, unknown or other
  modified_base (1103)..(1105): a, c, t, g, unknown or other
  modified_base (1109)..(1109): a, c, t, g, unknown or other
  modified_base (1113)..(1113): a, c, t, g, unknown or other
  modified_base (1116)..(1121): a, c, t, g, unknown or other
  modified_base (1123)..(1123): a, c, t, g, unknown or other
  modified_base (1126)..(1128): a, c, t, g, unknown or other
  modified_base (1135)..(1137): a, c, t, g, unknown or other
  modified_base (1141)..(1142): a, c, t, g, unknown or other
  modified_base (1147)..(1147): a, c, t, g, unknown or other
  modified_base (1154)..(1154): a, c, t, g, unknown or other
  modified_base (1158)..(1159): a, c, t, g, unknown or other
  modified_base (1161)..(1161): a, c, t, g, unknown or other
  modified_base (1168)..(1170): a, c, t, g, unknown or other
  modified_base (1172)..(1180): a, c, t, g, unknown or other
  modified_base (1182)..(1183): a, c, t, g, unknown or other
  modified_base (1185)..(1199): a, c, t, g, unknown or other
  modified_base (1203)..(1208): a, c, t, g, unknown or other
  modified_base (1210)..(1214): a, c, t, g, unknown or other
  modified_base (1219)..(1225): a, c, t, g, unknown or other
  modified_base (1228)..(1230): a, c, t, g, unknown or other
  modified_base (1234)..(1234): a, c, t, g, unknown or other
  modified_base (1237)..(1237): a, c, t, g, unknown or other
  modified_base (1239)..(1243): a, c, t, g, unknown or other
nnnnnnnnnnnnnnnntgnnntcgnannnngcnccttngtnatnnttcggatganngtctgttgactgagtggnggatgggtgnntaacgcgtgtttaacctgccctgtganggggatctgatgcnganacggctgctantaccgcataagcgcacgangagacatctccttgtgtgaaaaactccggtggtacnggatgggcccgcgtctgattagctggttggaaaggtaacggcctagctgggcnaggattattancctgtctgaaagggtgatcggtcactttggaactgagaccctgtccacacnnctaccgtcagnagcagtggggaatattgcacaatgggggaaaccctgatgcagcaacgccgcgtgagtgaagaagtatttcggtatgtaaagctctatcagcagggaagataatgacggtacctgactaagaagctccggctaaatacgtgccagcagccgcggtaatacgtatggagcaagcgttatccggatttactgggtgtaaagggtgcgtaggtggcagtgcaagtcagatgtgaaaggccggggctcaaccccggagctgcatttgaaactgctcngctagagtacaggagaggcaggcggaattcctagtgtagcggtgaaatgcgtagatattaggaggaacaccagtggcgaaggcggcctgctggactgttactgacactgaggcacgaaagcgtggggagcaaacaggattagataccctggtagtccacgccgtaaacgatgaatactaggtgtcggggccgtataggctccggtgccgccgctaacgcagtaagtattccacctggggagtacgttcgcaagaatgaaactcaaaggaattgacggggacccgcacaagcggtggagcatgtggtttaattcgaagcaacgcgaagaaccttaccnngtcttgacatccttctgaccgcannntaatcggtgctttccttcgggananaananacagnnnngcatgggttgtcgtcagctcgtnncgngagangtnnggnttaagtcccncaacgagcnnnncccctnnntcntcantanccagnnngtaanggctgggcnntctgannnactnccanggnnnnnntnggnnnaggtggnnncganntcaancatcatncccnntnatctggnnnannnnnnnnncnncnnnnnnnnnnnnnnngagnnnnnncnnnnnggggnnnnnnnccnnnaaanggncnnnnn

SEQ ID NO: 359 - DNA, 1397 bp, Eubacterium rectale
tgcagtcgaacgaagcactttatttgatttccttcgggactgattattttgtgactgagtggcggacgggtgagtaacgcgtgggtaacctgccttgtacagggggataacagttggaaacggctgctaataccgcataagcgcacagcatcgcatgatgcagtgtgaaaaactccggtggtataagatggacccgcgttggattagctagttggtgaggtaacggcccaccaaggcgacgatccatagccgacctgagagggtgaccggccacattgggactgagacacggcccaaactcctacgggaggcagcagtggggaatattgcacaatgggcgaaagcctgatgcagcgacgccgcgtgagcgaagaagtatttcggtatgtaaagctctatcagcagggaagataatgacggtacctgactaagaagcaccggctaaatacgtgccagcagccgcggtaatacgtatggtgcaagcgttatccggatttactgggtgtaaagggagcgcaggcggtgcggcaagtctgatgtgaaagcccggggctcaaccccggtactgcattggaaactgtcgtactagagtgtcggaggggtaagcggaattcctagtgtagcggtgaaatgcgtagatattaggaggaacaccagtggcgaaggcggcttactggacgataactgacgctgaggctcgaaagcgtggggagcaaacaggattagataccctggtagtccacgccgtaaacgatgaatactaggtgttgggaagcattgcttctcggtgccgtcgcaaacgcagtaagtattccacctggggagtacgttcgcaagaatgaaactcaaaggaattgacggggacccgcacaagcggtggagcatgtggtttaattcgaagcaacgcgaagaaccttaccaagtcttgacatccttctgaccggtacttaaccgtaccttctcttcggagcaggagtgacaggtggtgcatggttgtcgtcagctcgtgtcgtgagatgttgggttaagtcccgcaacgagcgcaacccttatctttagtagccagcggttaggccgggcactctagagagactgccagggataacctggaggaaggcggggatgacgtcaaatcatcatgccccttatgacttgggctacacacgtgctacaatggcgtaaacaaagggaagcaaagctgtgaagccgagcaaatctcaaaaataacgtctcagttcggactgtagtctgcaacccgactacacgaagctggaatcgctagtaatcgcagatcagaatgctgcggtgaatacgttcccgggtcttgtacacaccgcccgtcacaccatgggagttgggaatgcccgaagccagtgacctaaccgaaaggaaggagc

SEQ ID NO: 360 - DNA, 1397 bp, Bacteroides massiliensis
  modified_base (3)..(4): a, c, t, g, unknown or other
  modified_base (1396)..(1396): a, c, t, g, unknown or other
tgnnagtcgaggggcagcatggtcttagcttgctaaggccgatggcgaccggcgcacgggtgagtaacgcgtatccaacctgccttacactcttggacagccttctgaaagggagattaatacaagatgttatcatgagtaagcattttcgcatgattaaaggtttaccggtgtaagatggggatgcgttccattagatagtaggcggggtaacggcccacctagtcttcgatggataggggttctgagaggaaggtcccccacattggaactgagacacggtccaaactcctacgggaggcagcagtgaggaatattggtcaatggacgagagtctgaaccagccaagtagcgtgaaggatgaaggttctatggattgtaaacttcttttatacgggaataaacggatccacgtgtggatttttgcatgtaccgtatgaataaggatcggctaactccgtgccagcagccgcggtaatacggaggatccgagcgttatccggatttattgggtttaaagggagcgtagatgggttgttaagtcagttgtgaaagtttgcggctcaaccgtaaaattgcaattgatactggcagtcttgagtacagttgaggtaggcggaattcgtggtgtagcggtgaaatgcttagatatcacgaagaactccgattgcgaaggcagcttactaacctgtaactgacattgatgctcgaaagtgtgggtatcaaacaggattagataccctggtagtccacacggtaaacgatgaatactcgctgtaggcgatatacggtctgcggccaagcgaaagcattaagtattccacctggggagtacgccggcaacggtgaaactcaaaggaattgacgggggcccgcacaagcggaggaacatgtggtttaattcgatgatacgcgaggaaccttacccgggcttaaattgcaaccgaatatggcggaaacgccatagctagcaatagcggttgtgaaggtgctgcatggttgtcgtcagctcgtgccgtgaggtgtcggcttaagtgccataacgagcgcaacccttgccgatagttactaacaggtcatgctgaggactctgtcgggactgccatcgtaagatgtgaggaaggtggggatgacgtcaaatcagcacggcccttacgtccggggctacacacgtgttacaatggggggtacagagggctgctaccacgcaagtggatgccaatcccaaaaacctctctcagttcggattgaagtctgcaacccgacttcatgaagctggattcgctagtaatcgcgcatcagccacggcgcggtgaatacgttcccgggccttgtacacaccgcccgtcaagccatgggagccgggggtacctgaagtgcgtaaccgcaaggagcnc

SEQ ID NO: 361 - DNA, 1401 bp, Bacteroides stercoris
  modified_base (5)..(5): a, c, t, g, unknown or other
  modified_base (1399)..(1400): a, c, t, g, unknown or other
ttacncatgcagtcgaggggcagcatcatcaaagcttgctttgatggatggcgaccggcgcacgggtgagtaacacgtatccaacctgccgacaacactgggatagcctttcgaaagaaagattaataccggatggcataattattccgcatgggataattattaaagaatttcggttgtcgatggggatgcgttccattaggcagttggcggggtaacggcccaccaaacctacgatggataggggttctgagaggaaggtcccccacattggaactgagacacggtccaaactcctacgggaggcagcagtgaggaatattggtcaatggacgagagtctgaaccagccaagtagcgtgaaggatgactgccctatgggttgtaaacttcttttatacgggaataaagtgagccacgtgtggctttttgtatgtaccgtatgaataaggatcggctaactccgtgccagcagccgcggtaatacggaggatccgagcgttatccggatttattgggtttaaagggagcgtaggcgggttgttaagtcagttgtgaaagtttgcggctcaaccgtaaaattgcagttgatactggcgaccttgagtgcaacagaggtaggcggaattcgtggtgtagcggtgaaatgcttagatatcacgaagaactccgattgcgaaggcagcttactggattgtaactgacgctgatgctcgaaagtgtgggtatcaaacaggattagataccctggtagtccacacagtaaacgatgaatactcgctgttggcgatatacagtcagcggccaagcgaaagcattaagtattccacctggggagtacgccggcaacggtgaaactcaaaggaattgacgggggcccgcacaagcggaggaacatgtggtttaattcgatgatacgcgaggaaccttacccgggcttaaattgcaactgacggaaccggaaacggttctttcttcggacagttgtgaaggtgctgcatggttgtcgtcagctcgtgccgtgaggtgtcggcttaagtgccataacgagcgcaacccttacgggtagttaccatcaggttatgctggggactctacccggactgccgtcgtaagatgtgaggaaggtggggatgacgtcaaatcagcacggcccttacgtccggggctacacacgtgttacaatggggggtacagaaggcagctacacggcgacgtggtgctaatcccaaaagcctctctcagttcggattggagtctgcaacccgactccatgaagctggattcgctagtaatcgcgcatcagccacggcgcggtgaatacgttcccgggccttgtacacaccgcccgtcaagccatgaaagccgggggtacctgaagtacgtaaccgcgaggagcnnc

SEQ ID NO: 362 - DNA, 1402 bp, Prevotella copri
  modified_base (3)..(4): a, c, t, g, unknown or other
  modified_base (6)..(6): a, c, t, g, unknown or other
  modified_base (30)..(32): a, c, t, g, unknown or other
tanncntgcagtcgaggggaacgacatcgnnngcttgcttttgatgggcgtcgaccggcgcacgggtgagtaacgcgtatccaacctgcccaccacttggggataaccttgcgaaagtaagactaatacccaatgatatctctagaagacatctgaaagagattaaagatttatcggtgatggatggggatgcgtctgattagcttgttggcggggtaacggcccaccaaggcaacgatcagtaggggttctgagaggaaggtcccccacattggaactgagacacggtccaaactcctacgggaggcagcagtgaggaatattggtcaatggacgagagtctgaaccagccaagtagcgtgcaggaagacggccctatgggttgtaaactgcttttataagggaataaagtgagtctcgtgagactttttgcatgtaccttatgaataaggaccggctaattccgtgccagcagccgcggtaatacggaaggtccgggcgttatccggatttattgggtttaaagggagcgtaggccggagattaagcgtgttgtgaaatgtagacgctcaacgtctgcactgcagcgcgaactggtttccttgagtacgcacaaagtgggcggaattcgtggtgtagcggtgaaatgcttagatatcacgaagaactccgattgcgaaggcagctcactggagcgcaactgacgctgaagctcgaaagtgcgggtatcgaacaggattagataccctggtagtccgcacggtaaacgatggatgcccgctgttggtctgaataggtcagcggccaagcgaaagcattaagcatcccacctggggagtacgccggcaacggtgaaactcaaaggaattgacgggggcccgcacaagcggaggaacatgtggtttaattcgatgatacgcgaggaaccttacccgggcttgaattgcagaggaaggatttggagacaatgacgcccttcggggcctctgtgaaggtgctgcatggttgtcgtcagctcgtgccgtgaggtgtcggcttaagtgccataacgagcgcaacccctctccttagttgccatcaggtcaagctgggcactctggggacactgccaccgtaaggtgtgaggaaggtggggatgacgtcaaatcagcacggcccttacgtccggggctacacacgtgttacaatggcaggtacagagagacggtcccttgcaaaacggatcaaatccttaaagcctgtctcagttcggactggggtctgcaacccgaccccacgaagctggattcgctagtaatcgcgcatcagccatggcgcggtgaatacgttcccgggccttgtacacaccgcccgtcaagccatgaaagccgggggcgcctaaagtccgtgaccgtaaggagcg

SEQ ID NO: 363 - DNA, 1395 bp, Roseburia intestinalis
  modified_base (3)..(3): a, c, t, g, unknown or other
  modified_base (8)..(9): a, c, t, g, unknown or other
  modified_base (1391)..(1392): a, c, t, g, unknown or other
gcngtcgnncgaagcactttatttgatttcttcggaatgaagattttgtgactgagtggcggacgggtgagtaacgcgtgggtaacctgcctcatacagggggataacagttggaaacgactgctaataccgcataagcgcacagggtcgcatgacctggtgtgaaaaactccggtggtatgagatggacccgcgtctgattagccagttggtggggtaacggcctaccaaagcgacgatcagtagccgacctgagagggtgaccggccacattgggactgagacacggcccaaactcctacgggaggcagcagtggggaatattgcacaatgggggaaaccctgatgcagcgacgccgcgtgagcgaagaagtatttcggtatgtaaagctctatcagcagggaagaagaaatgacggtacctgactaagaagcaccggctaaatacgtgccagcagccgcggtaatacgtatggtgcaagcgttatccggatttactgggtgtaaagggagcgcaggcggtacggcaagtctgatgtgaaagcccggggctcaaccccggtactgcattggaaactgtcggactagagtgtcggaggggtaagtggaattcctagtgtagcggtgaaatgcgtagatattaggaggaacaccagtggcgaaggcggcttactggacgattactgacgctgaggctcgaaagcgtggggagcaaacaggattagataccctggtagtccacgccgtaaacgatgaatactaggtgtcggggagcattgctcttcggtgccgcagcaaacgcaataagtattccacctggggagtacgttcgcaagaatgaaactcaaaggaattgacggggacccgcacaagcggtggagcatgtggtttaattcgaagcaacgcgaagaaccttaccaagtcttgacatcccgatgacagaacatgtaatgtgttttctcttcggagcatcggtgacaggtggtgcatggttgtcgtcagctcgtgtcgtgagatgttgggttaagtcccgcaacgagcgcaacccctattcttagtagccagcgggtaagccgggcactctagggagactgccagggataacctggaggaaggtggggatgacgtcaaatcatcatgccccttatgacttgggctacacacgtgctacaatggcgtaaacaaagggaagcgagcctgcgagggggagcaaatctcaaaaataacgtctcagttcggactgcagtctgcaactcgactgcacgaagctggaatcgctagtaatcgcgaatcagaatgtcgcggtgaatacgttcccgggtcttgtacacaccgcccgtcacaccatgggagttggtaatgcccgaagtcagtgacccaaccgcaagganngag

SEQ ID NO: 364 - DNA, 1400 bp, Lachnospira sp.
  modified_base (2)..(3): a, c, t, g, unknown or other
  modified_base (5)..(5): a, c, t, g, unknown or other
  modified_base (30)..(30): a, c, t, g, unknown or other
anncntgcaagtcgaacgaagcatttaaanacggattttttcggaatgaagttttttatgactgagtggcggacgggtgagtaacgcgtgggtaacctgcctcacacagggggatagcagttggaaacgactggtaataccgcataagcgcacagcttcgcatgaagcggtgtgaaaaactccggtggtgtgagatggacccgcgtctgattaggtagttggtgaggtaacggcccaccaagccgacgatcagtagccgacctgagagggtgaccggccacattgggactgagacacggcccagactcctacgggaggcagcagtggggaatattgcacaatggaggaaactctgatgcagcgacgccgcgtgagtgaagaagtatttcggtatgtaaagctctatcagcagggaagacagtgacggtacctgactaagaagctccggctaaatacgtgccagcagccgcggtaatacgtatggagcaagcgttatccggatttactgggtgtaaagggagtgtaggtggtatcacaagtcagaagtgaaagcccggggctcaaaccccgggactgcttttgaaactgtggaactggagtgcaggagaggtaagtggaattcctagtgtagcggtgaaatgcgtagatattaggaggaacaccagtggcgaaggcggcttactggactgtaactgacactgaggctcgaaagcgtggggagcaaacaggattagataccctggtagtccacgccgtaaacgatgaatactaggtgtcggggctcataagagcttcggtgccgcagcaaacgcaataagtattccacctggggagtacgttcgcaagaatgaaactcaaaggaattgacggggacccgcacaagcggtggagcatgtggtttaattcgaagcaacgcgaagaaccttaccaagtcttgacatccttctgaccggacagtaatgtgtcctttccttcgggacagaagagacaggtggtgcatggttgtcgtcagctcgtgtcgtgagatgttgggttaagtcccgcaacgagcgcaacccctatcctcagtagccagcaggtaaagctgggcactctgtggagactgccagggataacctggaggaaggtggggatgacgtcaaatcatcatgccccttatgacttgggctacacacgtgctacaatggcgtaaacaaagtgaagcgagagtgtgagcttaagcaaatcacaaaaataacgtctcagttcggattgtagtctgcaactcgactacatgaagctggaatcgctagtaatcgcgaatcagaatgtcgcggtgaatacgttcccgggtcttgtacacaccgcccgtcacaccatgggagtcggaaatgcccgaagtcggtgacctaacgtaagaa

SEQ ID NO: 365 - DNA, 1394 bp, Paraprevotella clara
  modified_base (28)..(28): a, c, t, g, unknown or other
cagtcgaggggcagcatggacccagctnttgctgggtttgatggcgaccggcgcacgggtgagtaacgcgtatccaacctgccctttactccgggatagtctcctgaaagggagtttaataccggatgtgtttgtctttccgcatgggggcgacaaataaagattaattggtaaaggatggggatgcgtcccattagcttgttggcggggtaacggcccaccaaggcgacgatgggtaggggttctgagaggaaggtcccccacattggaactgagacacggtccaaactcctacgggaggcagcagtgaggaatattggtcaatgggcgggagcctgaaccagccaagtagcgtgaaggacgacggccctacgggttgtaaacttcttttataagggaataaagttcgccacgtgtggtgttttgtatgtaccttatgaataagcatcggctaattccgtgccagcagccgcggtaatacggaagatgcgagcgttatccggatttattgggtttaaagggagcgtaggcgggcttttaagtcagcggtcaaatgtcgtggctcaaccatgtcaagccgttgaaactgtaagccttgagtctgcacagggcacatggaattcgtggtgtagcggtgaaatgcttagatatcacgaagaactccgatcgcgaaggcattgtgccggggcataactgacgctgaggctcgaaagtgcgggtatcaaacaggattagataccctggtagtccgcacggtaaacgatgaatgctcgctatgggcgatatattgtccgtggccaagcgaaagcgttaagcattccacctggggagtacgccggcaacggtgaaactcaaaggaattgacgggggcccgcacaagcggaggaacatgtggtttaattcgatgatacgcgaggaaccttacccgggcttgaattgcaggtgcatgagtcagagatgattctttccttcgggactcctgtgaaggtgctgcatggttgtcgtcagctcgtgccgtgaggtgtcggcttaagtgccataacgagcgcaacccttctccccagttgccatcgggtaatgccgggccctctggggacactgccatcgtaagatgcgaggaaggtggggatgacgtcaaatcagcacggcccttacgtccggggccacacacgtgttacaatggggggtacagagggccgctgtccggtgacggtcggccaatccctaaaacccctctcagttcggactggagtctgcaacccgactccacgaagctggattcgctagtaatcgcgcatcagccatggcgcggtgaatacgttcccgggccttgtacacaccgcccgtcaagccatgaaagccgggggtgcctgaagtccgtgaccgcgagggtc

SEQ ID NO: 366 - DNA, 1401 bp, Eubacterium eligens
  modified_base (2)..(4): a, c, t, g, unknown or other
  modified_base (7)..(7): a, c, t, g, unknown or other
  modified_base (32)..(32): a, c, t, g, unknown or other
  modified_base (45)..(45): a, c, t, g, unknown or other
  modified_base (47)..(47): a, c, t, g, unknown or other
  modified_base (1399)..(1400): a, c, t, g, unknown or other
annntgnaagtcgaacgaagcatttagaacangattacttcggtntntgaagttctttatgactgagtggcggacgggtgagtaacgcgtgggtaacctgccttgtactgggggatagcagctggaaacggctggtaataccgcataagcgcacaatgttgcatgacatggtgtgaaaaactccggtggtataagatggacccgcgtctgattagctagttggtgagataacagcccaccaaggcgacgatcagtagccgacctgagagggtgaccggccacattgggactgagacacggcccagactcctacgggaggcagcagtggggaatattgcacaatggaggaaactctgatgcagcgacgccgcgtgagtgaagaagtaattcgttatgtaaagctctatcagcagggaagatagtgacggtacctgactaagaagctccggctaaatacgtgccagcagccgcggtaatacgtatggagcaagcgttatccggatttactgggtgtaaagggagtgtaggtggccatgcaagtcagaagtgaaaatccggggctcaaccccggaactgcttttgaaactgtaaggctggagtgcaggaggggtgagtggaattcctagtgtagcggtgaaatgcgtagatattaggaggaacaccagtggcgaaggcggctcactggactgtaactgacactgaggctcgaaagcgtggggagcaaacaggattagataccctggtagtccacgccgtaaacgatgaatactaggtgtcggggcccataagggcttcggtgccgcagcaaacgcaataagtattccacctggggagtacgttcgcaagaatgaaactcaaaggaattgacggggacccgcacaagcggtggagcatgtggtttaattcgaagcaacgcgaagaaccttaccaagtcttgacatcccactgaccggacagtaatgtgtcctttccttcgggacagtggtgacaggtggtgcatggttgtcgtcagctcgtgtcgtgagatgttgggttaagtcccgcaacgagcgcaacccctatccttagtagccagcagtaagatgggcactctagggagactgccagggataacctggaggaaggtggggatgacgtcaaatcatcatgccccttatgacttgggctacacacgtgctacaatggcgtaaacaaagtgaagcgaagtcgtgaggccaagcaaatcacaaaaataacgtctcagttcggattgtagtctgcaactcgactacatgaagctggaatcgctagtaatcgcagatcagaatgctgcggtgaatacgttcccgggtcttgtacacaccgcccgtcacaccatgggagtcgaaaatgcccgaagtcggtgacctaacgaaagaanna

SEQ ID NO: 367 - DNA, 1419 bp, Phascolarctobacterium faecium
  modified_base (25)..(25): a, c, t, g, unknown or other
tcgaacggagaattttatttcggtngaattcttagtggcgaacgggtgagtaacgcgtaggcaacctgccctttagacggggacaacattccgaaaggagtgctaataccggatgtgatcatcttgccgcatggcaggatgaagaaagatggcctctacaagtaagctatcgctaaaggatgggcctgcgtctgattagctagttggtagtgtaacggactaccaaggcgatgatcagtagccggtctgagaggatgaacggccacattgggactgagacacggcccaaactcctacgggaggcagcagtggggaatcttccgcaatggacgaaagtctgacggagcaacgccgcgtgagtgatgaaggatttcggtctgtaaagctctgttgtttatgacgaacgtgcagtgtgtgaacaatgcattgcaatgacggtagtaaacgaggaagccacggctaactacgtgccagcagccgcggtaatacgtaggtggcgagcgttgtccggaattattgggcgtaaagagcatgtaggcggcttaataagtcgagcgtgaaaatgcggggctcaaccccgtatggcgctggaaactgttaggcttgagtgcaggagaggaaaggggaattcccagtgtagcggtgaaatgcgtagatattgggaggaacaccagtggcgaaggcgcctttctggactgtgtctgacgctgagatgcgaaagccagggtagcgaacgggattagataccccggtagtcctggccgtaaacgatgggtactaggtgtaggaggtatcgaccccttctgtgccggagttaacgcaataagtaccccgcctggggagtacggccgcaaggttgaaactcaaaggaattgacgggggcccgcacaagcggtggagtatgtggtttaattcgacgcaacgcgaagaaccttaccaaggcttgacattgattgaacgctctagagatagagctttcccttcggggacaagaaaacaggtggtgcatggctgtcgtcagctcgtgtcgtgagatgttgggttaagtcccgcaacgagcgcaacccctatcctatgttaccagcaagtaaagttggggactcatgggagactgccagggacaacctggaggaaggcggggatgacgtcaagtcatcatgccccttatgtcttgggctacacacgtactacaatggtcggaaacagagggaagcgaagccgcgaggcagagcaaaccccagaaacccgatctcagttcggatcgcaggctgcaacccgcctgcgtgaagtcggaatcgctagtaatcgcaggtcagcatactgcggtgaatacgttcccgggccttgtacacaccgcccgtcacaccacgaaagttggtaacacccgaagccggtgaggtaacctattaggagccagcc

SEQ ID NO: 368 - DNA, 1395 bp, Alistipes putredinis
  modified_base (3)..(3): a, c, t, g, unknown or other
tgnaagtcgaggggcagcataatggatagcaatatctatggtggcgaccggcgcacgggtgcgtaacgcgtatgcaacctacctttaacagggggataacactgagaaattggtactaataccccataatatcatagaaggcatcttttatggttgaaaattccgatggttagagatgggcatgcgttgtattagctagttggtggggtaacggctcaccaaggcgacgatacatagggggactgagaggttaaccccccacactggtactgagacacggaccagactcctacgggaggcagcagtgaggaatattggtcaatggacgcaagtctgaaccagccatgccgcgtgcaggatgacggctctatgagttgtaaactgcttttgtacgagggtaaacgcagatacgtgtatctgtctgaaagtatcgtacgaataaggatcggctaactccgtgccagcagccgcggtaatacggaggattcaagcgttatccggatttattgggtttaaagggtgcgtaggcggtttgataagttagaggtgaaatttcggggctcaaccctgaacgtgcctctaatactgttgagctagagagtagttgcggtaggcggaatgtatggtgtagcggtgaaatgcttagagatcatacagaacaccgattgcgaaggcagcttaccaaactatatctgacgttgaggcacgaaagcgtggggagcaaacaggattagataccctggtagtccacgcagtaaacgatgataactcgttgtcggcgatacacagtcggtgactaagcgaaagcgataagttatccacctggggagtacgttcgcaagaatgaaactcaaaggaattgacgggggcccgcacaagcggaggaacatgtggtttaattcgatgatacgcgaggaaccttacccgggcttgaaagttagcgacgaattcttgaaagaggatttcccttcggggcgcgaaactaggtgctgcatggttgtcgtcagctcgtgccgtgaggtgtcgggttaagtcccataacgagcgcaacccctaccgttagttgccatcaggtgaagctgggcactctggcgggactgccggtgtaagccgagaggaaggtggggatgacgtcaaatcagcacggcccttacgtccggggctacacacgtgttacaatggtaggtacagagggcagctacccagcgatgggatgcgaatctcgaaagcctatctcagttcggattggaggctgaaacccgcctccatgaagttggattcgctagtaatcgcgcatcagccatggcgcggtgaatacgttcccgggccttgtacacaccgcccgtcaagccatgggagccgggggtgcctgaagttcgtgaccgcaaggagcga

SEQ ID NO: 369 - DNA, 1388 bp, Unknown
  Description of Unknown: Clostridiales sp. FBI00369 sequence
tgcagtcgagcggagacagtgagtagcttgctatgagctgttttagcggcggacgggtgagtaacgcgtgagcaacctttcccagacaggggaataacacaccgaaaggtgtactaataccgcataagaccacgggatcacatggttctggggtaaaagatttatcggtttggggtgggctcgcgtccgattaggtagttggtgaggtaacggcccaccaagccgacgatcggtagccgacctgagagggtgatcggccacattgggactgagacacggcccaaactcctacgggaggcagcagtggggaatattgggcaatggggggaaccctgacccagcaacgccgcgtggaggaagaaggttttcggatcgtaaactcctgtccttggagacgagtagaagacggtatccaaggaggaagccccggctaactacgtgccagcagccgcggtaatacgtagggggcaagcgttgtccggaataattgggcgtaaagggcgcgtaggcggctcggtaagtctggagtgaaagtcctgcttttaaggtgggaattgctttggatactgtcgggcttgagtgcaggagaggttagtggaattcccagtgtagcggtgaaatgcgtagagattgggaggaacaccagtggcgaaggcgactaactggactgtaactgacgctgaggcgcgaaagtgtggggagcaaacaggattagataccctggtagtccacactgtaaacgatgaatgctaggtgtagggggtatcgaccccttctgtgccgcagtcaacacaataagcattccgcctggggagtacggccgcaaggttgaaactcaaaggaattgacgggggcccgcacaagcagcggagcatgtggtttaattcgacgcaacgcgaagaaccttaccaggtcttgacatccacttaaacttacagagatgtaaggtgtgcttgcacaaagtgagacaggtggtgcatggttgtcgtcagctcgtgtcgtgagatgttgggttaagtcccgcaacgagcgcaacccttatcttcagttactaacgcgtgaaggtgaggactctgaagagactgccggggacaactcggaggaaggtggggacgacgtcaaatcatcatgccccttatgacctgggctacacacgtgctacaatggccacgacagagagaagcgaaatcgcaaggtagagcggaactcaaaaaagtggtcccagttcggattgtgggctgcaacccgcccacatgaagtcggagttgctagtaatcgcggatcagcatgccgcggtgaatacgttcccgggccttgtacacaccgcccgtcacaccatgggagttgggagtgcccaaagccggtgaggcaaccgcaaggagccagcc

SEQ ID NO: 370 - DNA, 1247 bp, Bifidobacterium adolescentis
  modified_base (1)..(1): a, c, t, g, unknown or other
  modified_base (4)..(7): a, c, t, g, unknown or other
  modified_base (11)..(13): a, c, t, g, unknown or other
  modified_base (16)..(16): a, c, t, g, unknown or other
  modified_base (19)..(22): a, c, t, g, unknown or other
  modified_base (25)..(28): a, c, t, g, unknown or other
  modified_base (31)..(31): a, c, t, g, unknown or other
  modified_base (33)..(33): a, c, t, g, unknown or other
  modified_base (35)..(48): a, c, t, g, unknown or other
  modified_base (53)..(53): a, c, t, g, unknown or other
  modified_base (55)..(56): a, c, t, g, unknown or other
  modified_base (59)..(61): a, c, t, g, unknown or other
  modified_base (63)..(67): a, c, t, g, unknown or other
  modified_base (70)..(71): a, c, t, g, unknown or other
  modified_base (73)..(73): a, c, t, g, unknown or other
  modified_base (75)..(75): a, c, t, g, unknown or other
  modified_base (77)..(78): a, c, t, g, unknown or other
  modified_base (81)..(81): a, c, t, g, unknown or other
  modified_base (83)..(86): a, c, t, g, unknown or other
  modified_base (88)..(88): a, c, t, g, unknown or other
  modified_base (90)..(93): a, c, t, g, unknown or other
  modified_base (96)..(96): a, c, t, g, unknown or other
  modified_base (98)..(107): a, c, t, g, unknown or other
  modified_base (111)..(111): a, c, t, g, unknown or other
  modified_base (113)..(114): a, c, t, g, unknown or other
  modified_base (117)..(122): a, c, t, g, unknown or other
  modified_base (126)..(127): a, c, t, g, unknown or other
  modified_base (129)..(129): a, c, t, g, unknown or other
  modified_base (132)..(133): a, c, t, g, unknown or other
  modified_base (150)..(150): a, c, t, g, unknown or other
  modified_base (152)..(153): a, c, t, g, unknown or other
  modified_base (159)..(161): a, c, t, g, unknown or other
  modified_base (180)..(180): a, c, t, g, unknown or other
  modified_base (185)..(185): a, c, t, g, unknown or other
  modified_base (187)..(187): a, c, t, g, unknown or other
  modified_base (192)..(196): a, c, t, g, unknown or other
  modified_base (205)..(207): a, c, t, g, unknown or other
  modified_base (218)..(219): a, c, t, g, unknown or other
  modified_base (241)..(243): a, c, t, g, unknown or other
  modified_base (1220)..(1221): a, c, t, g, unknown or other
  modified_base (1226)..(1226): a, c, t, g, unknown or other
  modified_base (1238)..(1247): a, c, t, g, unknown or other
naannnntttnnntcnggnnnnggnnnnggngncnnnnnnnnnnnnnnttgangnnggnnncnnnnnccnngntngnnggnannnncngnnnnggncnnnnnnnnnnggantnngannnnnncagnntnctnngggaggcagcagtgggnannattgcnnnatgggcgcaagcctgatgnagcgncnccgcnnnnngggatgacnnnttcgggttgtnnccgcttttgactgggagcaagnnntcggggtgagtgtacctttcgaataagcaccggctaactacgtgccagcagccgcggtaatacgtagggtgcaagcgttatccggaattattgggcgtaaagggctcgtaggcggttcgtcgcgtccggtgtgaaagtccatcgcttaacggtggatccgcgccgggtacgggcgggcttgagtgcggtaggggagactggaattcccggtgtaacggtggaatgtgtagatatcgggaagaacaccaatggcgaaggcaggtctctgggccgtcactgacgctgaggagcgaaagcgtggggagcgaacaggattagataccctggtagtccacgccgtaaacggtggatgctggatgtggggaccattccacggtctccgtgtcggagccaacgcgttaagcatcccgcctggggagtacggccgcaaggctaaaactcaaagaaattgacgggggcccgcacaagcggcggagcatgcggattaattcgatgcaacgcgaagaaccttacctgggcttgacatgttcccgacagccccagagatggggcctcccttcggggcgggttcacaggtggtgcatggtcgtcgtcagctcgtgtcgtgagatgttgggttaagtcccgcaacgagcgcaaccctcgccctgtgttgccagcacgtcgtggtgggaactcacgggggaccgccggggtcaactcggaggaaggtggggatgacgtcagatcatcatgccccttacgtccagggcttcacgcatgctacaatggccggtacaacgggatgcgacaccgcgaggtggagcggatcccttaaaaccggtctcagttcggattggagtctgcaacccgactccatgaaggcggagtcgctagtaatcgcggatcagcaacgccgcggtgaatgcgttcccgggccttgtacacaccgcccgtcaagtcatgaaagtgggtagcacccgaagccggtggcccannctttntggggggagccnnnnnnnnnn

SEQ ID NO: 371 - DNA, 1385 bp, Bacteroides stercoris
tcgaggggcagcatcatcaaagcttgctttgatggatggcgaccggcgcacgggtgagtaacacgtatccaacctgccgacaacactgggatagcctttcgaaagaaagattaataccggatggcataattttcccgcatgggataattattaaagaatttcggttgtcgatggggatgcgttccattaggcagttggcggggtaacggcccaccaaaccaacgatggataggggttctgagaggaaggtcccccacattggaactgagacacggtccaaactcctacgggaggcagcagtgaggaatattggtcaatggacgagagtctgaaccagccaagtagcgtgaaggatgactgccctatgggttgtaaacttcttttatacgggaataaagtgagccacgtgtggctttttgtatgtaccgtatgaataaggatcggctaactccgtgccagcagccgcggtaatacggaggatccgagcgttatccggatttattgggtttaaagggagcgtaggcgggttgttaagtcagttgtgaaagtttgcggctcaaccgtaaaattgcagttgatactggcgaccttgagtgcaacagaggtaggcggaattcgtggtgtagcggtgaaatgcttagatatcacgaagaactccgattgcgaaggcagcttactggattgtaactgacgctgatgctcgaaagtgtgggtatcaaacaggattagataccctggtagtccacacagtaaacgatgaatactcgctgttggcgatatactgtcagcggccaagcgaaagcattaagtattccacctggggagtacgccggcaacggtgaaactcaaaggaattgacgggggcccgcacaagcggaggaacatgtggtttaattcgatgatacgcgaggaaccttacccgggcttaaattgcaactgacggaatcggaaacggttctttcttcggacagttgtgaaggtgctgcatggttgtcgtcagctcgtgccgtgaggtgtcggcttaagtgccataacgagcgcaacccttatcggtagttaccagcaggtcatgctggggactctaccgagactgccgtcgtaagatgtgaggaaggtggggatgacgtcaaatcagcacggcccttacgtccggggctacacacgtgttacaatggggggtacagaaggcagctacacggcgacgtggtgctaatcccgaaagcctctctcagttcggattggagtctgcaacccgactccatgaagctggattcgctagtaatcgcgcatcagccacggcgcggtgaatacgttcccgggccttgtacacaccgcccgtcaagccatgaaagccgggggtacctgaagtacgtaaccgcgaggag

SEQ ID NO: 372 - DNA, 1392 bp, Dorea longicatena
  modified_base (21)..(22): a, c, t, g, unknown or other
  modified_base (26)..(27): a, c, t, g, unknown or other
  modified_base (41)..(43): a, c, t, g, unknown or other
tgcagtcgagcgaagcgcttnngttnnattcttcggatgannncctttgtgactgagcggcggacgggtgagtaacgcgtgggtaacctgcctcatacagggggataacagttagaaatgactgctaataccgcataagaccacggtaccgcatggtacagtggtaaaaactccggtggtatgagatggacccgcgtctgattaggtagttggtggggtaacggcctaccaagccgacgatcagtagccgacctgagagggtgaccggccacattgggactgagacacggcccagactcctacgggaggcagcagtggggaatattgcacaatggaggaaactctgatgcagcgacgccgcgtgaaggatgaagtatttcggtatgtaaacttctatcagcagggaagaaaatgacggtacctgactaagaagccccggctaactacgtgccagcagccgcggtaatacgtagggggcaagcgttatccggatttactgggtgtaaagggagcgtagacggcacggcaagccagatgtgaaagcccggggctcaaccccgggactgcatttggaactgctgagctagagtgtcggagaggcaagtggaattcctagtgtagcggtgaaatgcgtagatattaggaggaacaccagtggcgaaggcggcttgctggacgatgactgacgttgaggctcgaaagcgtggggagcaaacaggattagataccctggtagtccacgccgtaaacgatgactgctaggtgtcgggtggcaaagccattcggtgccgcagctaacgcaataagcagtccacctggggagtacgttcgcaagaatgaaactcaaaggaattgacggggacccgcacaagcggtggagcatgtggtttaattcgaagcaacgcgaagaaccttacctgatcttgacatcccgatgaccgcttcgtaatggaagcttttcttcggaacatcggtgacaggtggtgcatggttgtcgtcagctcgtgtcgtgagatgttgggttaagtcccgcaacgagcgcaacccctatcttcagtagccagcaggttaagctgggcactctggagagactgccagggataacctggaggaaggtggggatgacgtcaaatcatcatgccccttatgaccagggctacacacgtgctacaatggcgtaaacaaagagaagcgaactcgcgagggtaagcaaatctcaaaaataacgtctcagttcggattgtagtctgcaactcgactacatgaagctggaatcgctagtaatcgcagatcagaatgctgcggtgaatacgttcccgggtcttgtacacaccgcccgtcacaccatgggagtcagtaacgcccgaagtcagtgacccaaccgtaaggagg

SEQ ID NO: 373 - DNA, 1255 bp, Unknown
  Description of Unknown: Coriobacteriaceae sp. FBI00373 FBI00374 sequence
  modified_base (1)..(5): a, c, t, g, unknown or other
  modified_base (7)..(10): a, c, t, g, unknown or other
  modified_base (12)..(14): a, c, t, g, unknown or other
  modified_base (16)..(29): a, c, t, g, unknown or other
  modified_base (31)..(33): a, c, t, g, unknown or other
  modified_base (35)..(35): a, c, t, g, unknown or other
  modified_base (38)..(42): a, c, t, g, unknown or other
  modified_base (44)..(52): a, c, t, g, unknown or other
  modified_base (54)..(57): a, c, t, g, unknown or other
  modified_base (59)..(61): a, c, t, g, unknown or other
  modified_base (63)..(63): a, c, t, g, unknown or other
  modified_base (65)..(68): a, c, t, g, unknown or other
  modified_base (71)..(73): a, c, t, g, unknown or other
  modified_base (75)..(75): a, c, t, g, unknown or other
  modified_base (77)..(80): a, c, t, g, unknown or other
  modified_base (83)..(101): a, c, t, g, unknown or other
  modified_base (103)..(123): a, c, t, g, unknown or other
  modified_base (125)..(128): a, c, t, g, unknown or other
  modified_base (130)..(130): a, c, t, g, unknown or other
  modified_base (134)..(140): a, c, t, g, unknown or other
  modified_base (142)..(143): a, c, t, g, unknown or other
  modified_base (146)..(146): a, c, t, g, unknown or other
  modified_base (148)..(151): a, c, t, g, unknown or other
  modified_base (155)..(155): a, c, t, g, unknown or other
  modified_base (157)..(157): a, c, t, g, unknown or other
  modified_base (161)..(161): a, c, t, g, unknown or other
  modified_base (163)..(165): a, c, t, g, unknown or other
  modified_base (169)..(169): a, c, t, g, unknown or other
  modified_base (172)..(172): a, c, t, g, unknown or other
  modified_base (174)..(176): a, c, t, g, unknown or other
  modified_base (186)..(187): a, c, t, g, unknown or other
  modified_base (193)..(193): a, c, t, g, unknown or other
  modified_base (202)..(202): a, c, t, g, unknown or other
  modified_base (205)..(208): a, c, t, g, unknown or other
  modified_base (210)..(210): a, c, t, g, unknown or other
  modified_base (213)..(213): a, c, t, g, unknown or other
  modified_base (216)..(219): a, c, t, g, unknown or other
  modified_base (226)..(226): a, c, t, g, unknown or other
  modified_base (228)..(228): a, c, t, g, unknown or other
  modified_base (233)..(233): a, c, t, g, unknown or other
  modified_base (235)..(235): a, c, t, g, unknown or other
  modified_base (248)..(256): a, c, t, g, unknown or other
  modified_base (270)..(270): a, c, t, g, unknown or other
  modified_base (314)..(314): a, c, t, g, unknown or other
  modified_base (333)..(333): a, c, t, g, unknown or other
  modified_base (337)..(337): a, c, t, g, unknown or other
  modified_base (415)..(415): a, c, t, g, unknown or other
  modified_base (518)..(518): a, c, t, g, unknown or other
  modified_base (1222)..(1223): a, c, t, g, unknown or other
  modified_base (1225)..(1226): a, c, t, g, unknown or other
  modified_base (1229)..(1232): a, c, t, g, unknown or other
  modified_base (1234)..(1236): a, c, t, g, unknown or other
  modified_base (1238)..(1255): a, c, t, g, unknown or other
nnnnnannnnannncnnnnnnnnnnnnnncnnnanggnnnnngnnnnnnnnngnnnngnnncngnnnntannnantnnnnggnnnnnnnnnnnnnnnnnnngnnnnnnnnnnnnnnnnnnnnngnnnnantgannnnnnncnngantnnnncggnangcancnnngggnatntnnncaatgggggnncctgangcagcgacncgnnnncnggnacnnnncctcggntngtaancngctttcagcaggnnnnnnnnnaaggtgacggtacntgcagaagaagccccggctaaatacgtgccagcagccgcggtantacgtatggggcgagcgtnatcnggattcattgggcgtaaagcgcgcgtaggcggcctcgtaggcccgggagtcaaatccgggggctcaacccccgcccgntcccggaaccacggggcttgagtctggcaggggagggtggaattcccagtgtagcggtggaatgcgcagatattgggaagaacaccggtggcgaaggcggccntctgggccacgactgacgctgaggcgcgaaagctgggggagcgaacaggattagataccctggtagtcccagccgtaaacgatggacgctaggtgtggggggacgatccccccgtgccgcagccaacgcattaagcgtcccgcctggggagtacggccgcaaggctaaaactcaaaggaattgacgggggcccgcacaagcagcggagcatgtggcttaattcgaagcaacgcgaagaaccttacctgggcttgacattcaggtgaagcggcggagacgccgtggccgagaggagcctgaacaggtggtgcatggctgtcgtcagctcgtgtcgtgagatgttgggttaagtcccgcaacgagcgcaacccccgtcgcgtgttgccagcggttcggccgggcacccgcgcgagaccgccggcgtcaagccggaggaaggtggggacgacgtcaagtcatcatgccccttatgtccagggctgcacacgtgctacaatggccggcacagcgggctgcgactgcgcgagcaggagcgaatcccccaaagccggccccagttcggaccgggggctgcaacccgcccccgcgaagtcggagttgctagtaatcgcggatcagcacgccgcggtgaatgcgttcccgggccttgtacacaccgcccgtcacaccacccgagtcgtctgcacccgaagtcgccggcccanncnncannnngnnngnnnnnnnnnnnnnnnnnn

SEQ ID NO: 374 - DNA, 1263 bp, Unknown
  Description of Unknown: Coriobacteriaceae sp. FBI00373 FBI00374 sequence
  modified_base (1)..(6): a, c, t, g, unknown or other
  modified_base (9)..(12): a, c, t, g, unknown or other
  modified_base (14)..(16): a, c, t, g, unknown or other
  modified_base (18)..(19): a, c, t, g, unknown or other
  modified_base (22)..(24): a, c, t, g, unknown or other
  modified_base (26)..(37): a, c, t, g, unknown or other
  modified_base (39)..(39): a, c, t, g, unknown or other
  modified_base (45)..(46): a, c, t, g, unknown or other
  modified_base (48)..(64): a, c, t, g, unknown or other
  modified_base (69)..(71): a, c, t, g, unknown or other
  modified_base (75)..(75): a, c, t, g, unknown or other
  modified_base (77)..(78): a, c, t, g, unknown or other
  modified_base (80)..(80): a, c, t, g, unknown or other
  modified_base (82)..(83): a, c, t, g, unknown or other
  modified_base (86)..(91): a, c, t, g, unknown or other
  modified_base (93)..(96): a, c, t, g, unknown or other
  modified_base (98)..(99): a, c, t, g, unknown or other
  modified_base (102)..(102): a, c, t, g, unknown or other
  modified_base (104)..(105): a, c, t, g, unknown or other
  modified_base (108)..(113): a, c, t, g, unknown or other
  modified_base (115)..(115): a, c, t, g, unknown or other
  modified_base (117)..(118): a, c, t, g, unknown or other
  modified_base (120)..(128): a, c, t, g, unknown or other
  modified_base (131)..(131): a, c, t, g, unknown or other
  modified_base (133)..(133): a, c, t, g, unknown or other
  modified_base (135)..(135): a, c, t, g, unknown or other
  modified_base (137)..(137): a, c, t, g, unknown or other
  modified_base (141)..(146): a, c, t, g, unknown or other
  modified_base (149)..(150): a, c, t, g, unknown or other
  modified_base (152)..(153): a, c, t, g, unknown or other
  modified_base (155)..(158): a, c, t, g, unknown or other
  modified_base (162)..(163): a, c, t, g, unknown or other
  modified_base (170)..(173): a, c, t, g, unknown or other
  modified_base (179)..(179): a, c, t, g, unknown or other
  modified_base (182)..(183): a, c, t, g, unknown or other
  modified_base (193)..(194): a, c, t, g, unknown or other
  modified_base (197)..(197): a, c, t, g, unknown or other
  modified_base (209)..(209): a, c, t, g, unknown or other
  modified_base (211)..(213): a, c, t, g, unknown or other
  modified_base (223)..(224): a, c, t, g, unknown or other
  modified_base (227)..(227): a, c, t, g, unknown or other
  modified_base (239)..(239): a, c, t, g, unknown or other
  modified_base (254)..(254): a, c, t, g, unknown or other
  modified_base (256)..(256): a, c, t, g, unknown or other
  modified_base (258)..(263): a, c, t, g, unknown or other
  modified_base (341)..(341): a, c, t, g, unknown or other
  modified_base (348)..(348): a, c, t, g, unknown or other
  modified_base (1234)..(1234): a, c, t, g, unknown or other
  modified_base (1241)..(1244): a, c, t, g, unknown or other
  modified_base (1247)..(1248): a, c, t, g, unknown or other
  modified_base (1250)..(1252): a, c, t, g, unknown or other
  modified_base (1254)..(1263): a, c, t, g, unknown or other
nnnnnngannnnannncnngannntnnnnnnnnnnnnangggagnngnnnnnnnnnnnnnnnnncggcnnntagntnntngnnggnnnnnncnnnngnngantnnggnnnnnntnanngnnnnnnnnnagntngnantgannnnnnccnngnntnnnncggnnggcagcnnnngggatntgnncaatgggggnnccngacgcagcgacncnnngcgggacgannccntcgggtcgtaanccgctttcagcaggnangnnnnnncaaggtgacggtacctgcagaagaagccccggctaaatacgtgccagcagccgcggtaatacgtatggggcgagcgtnatccggnattcattgggcgtaaagcgcgcgtaggcggcctcgtaggccgggagtcaaatccgggggctcaacccccgcccgctcccggaaccacggggcttgagtctggcaggggagggtggaattcccagtgtagcggtggaatgcgcagatattgggaagaacaccggtggcgaaggcggccctctgggccacgactgacgctgaggcgcgaaagctgggggagcgaacaggattagataccctggtagtcccagccgtaaacgatggacgctaggtgtggggggacgatccccccgtgccgcagccaacgcattaagcgtcccgcctggggagtacggccgcaaggctaaaactcaaaggaattgacgggggcccgcacaagcagcggagcatgtggcttaattcgaagcaacgcgaagaaccttacctgggcttgacattcaggtgaagcggcggagacgccgtggccgagaggagcctgaacaggtggtgcatggctgtcgtcagctcgtgtcgtgagatgttgggttaagtcccgcaacgagcgcaacccccgtcgcgtgttgccagcggttcggccgggcacccgcgcgagaccgccggcgtcaagccggaggaaggtggggacgacgtcaagtcatcatgccccttatgtccagggctgcacacgtgctacaatggccggcacagcgggctgcgactgcgcgagcaggagcgaatcccccaaagccggccccagttcggaccgggggctgcaacccgcccccgcgaagtcggagttgctagtaatcgcggatcagcacgccgcggtgaatgcgttcccgggccttgtacacaccgcccgtcacaccacccgagtcgtctgcacccgaagtcgccggcccaaccancagtggnnnnggnntnnnannnnnnnnnn

SEQ ID NO: 375 - DNA, 1405 bp, Dorea longicatena
tgcagtcgagcgaagcagcttaaggtattgattcttcggatgatatgtacttttgtgactgagcggcggacgggtgagtaacgcgtgggtaacctgcctcatacagggggataacagttagaaatgactgctaataccgcataagaccacggtaccgcatggtacagtggtaaaaactccggtggtatgagatggacccgcgtctgattaggtagttggtggggtaacggcctaccaagccgacgatcagtagccgacctgagagggtgaccggccacattgggactgagacacggcccagactcctacgggaggcagcagtggggaatattgcacaatggaggaaactctgatgcagcgacgccccgtgaaggatgaagtatttcggtatgtaaacttctatcagcagggaagaaaatgacggtacctgactaagaagccccggctaactacgtgccagcagccgcggtaatacgtagggggcaagcgttatccggatttactgggtgtaaagggagcgtagacggcacggcaagccagatgtgaaagcccggggctcaaccccgggactgcatttggaactgctgagctagagtgtcggagaggcaagtggaattcctagtgtagcggtgaaatgcgtagatattaggaggaacaccagtggcgaaggcggcttgctggacgatgactgacgttgaggctcgaaagcgtggggagcaaacaggattagataccctggtagtccacgccgtaaacgatgactgctaggtgtcgggtggcaaagccattcggtgccgcagctaacgcaataagcagtccacctggggagtacgttcgcaagaatgaaactcaaaggaattgacggggacccgcacaagcggtggagcatgtggtttaattcgaagcaacgcgaagaaccttacctgatcttgacatcccgatgaccgcttcgtaatggaagcttttcttcggaacatcggtgacaggtggtgcatggttgtcgtcagctcgtgtcgtgagatgttgggttaagtcccgcaacgagcgcaacccctatcttcagtagccagcaggttaagctgggcactctggagagactgccagggataacctggaggaaggtggggatgacgtcaaatcatcatgccccttatgaccagggctacacacgtgctacaatggcgtaaacaaagagaagcgaactcgcgagggtaagcaaatctcaaaaataacgtctcagttcggattgtagtctgcaactcgactacatgaagctggaatcgctagtaatcgcagatcagaatgctgcggtgaatacgttcccgggtcttgtacacaccgcccgtcacaccatgggagtcagtaacgcccgaagtcagtgacccaaccgtaaggagggagctgc

SEQ ID NO: 376 - DNA, 1431 bp, Dialister succinatiphilus
tgcaagtcgaacgggaggaaagagaagcttgcttctttttgaatctagtggcaaacgggtgagtaacacgtaaacaacctgccttcaggatggggacaacagacggaaacgactgctaataccgaatgtgttccggagaccgcatgatttccggaagaaaggatggcctctatttataagctatcgcctgaagaggggtttgcgtctgattaggcagttggtgaggtaacggcccaccaaacctacgatcagtagccggtctgagaggatgaacggccacactggaactgagacacggtccagactcctacgggaggcagcagtggggaatcttccgcaatggacgaaagtctgacggagcaacgccgcgtgagtgatgacggccttcgggttgtaaagctctgtgatcggggacgaatggctggtatgctaataccatatcagagtgacggtacccgaatagcaagccacggctaactacgtgccagcagccgcggtaatacgtaggtggcaagcgttgtccggaattattgggcgtaaagcgcgcgcaggcggcttcttaagtccatcttaaaagtgcggggcttaaccccgtgatgggatggaaactgggaggctggagtatcggagaggaaagtggaattcctagtgtagcggtgaaatgcgtagagattaggaagaacaccggtggcgaaggcgactttctggacgacaactgacgctgaggcgcgaaagcgtggggagcaaacaggattagataccctggtagtccacgccgtaaacgatgaatactaggtgtaggaggtatcgaccccttctgtgccggagctaacacaataagtattccgcctgggaagtacgatcgcaagattaaaactcaaaggaattgacgggggcccgcacaagcggtggagtatgtggtttaattcgacgcaacgcgaagaaccttaccaggtcttgacattgactgcaatcccgagaaatcgggagttcccttcggggacaggaaaacaggtggtgcacggctgtcgtcagctcgtgtcgtgagatgttgggttaagtcccgcaacgagcgcaacccctatcttatgttgccagcacgtaatggtgggaactcatgagagaccgccgcggacaacgcggaggaaggcggggatgacgtcaagtcatcatgccccttatgacctgggctacacacgtactacaatgggtgtcaacaaagagaagcaatggggcgacccggagcaaacctcaaaaacacacccccagttcagattgcaggctgcaacccgcctgcatgaagcaggaatcgctagtaatcgcgggtcagcataccgcggtgaatacgttcccgggccttgtacacaccgcccgtcacactatgagagtcagaaacacccgaagccggtgaggtaaccgtaaggagccagc

SEQ ID NO: 377 - DNA, 1382 bp, Unknown
  Description of Unknown: Clostridiales sp. FBI00377 sequence
tcgaacggagatatttatttgcggtagatatcttagtggcgcacgggtgagtaacgcgtgaataacctgacccgaagagggggataacacctggaaacaagtgctaataccgcataagaccacggaccggcatcggtcagaggtcaaaggaggaatccgctttgggaggggttcgcgtcccattaggtagttggtgaggtaacggcccaccaagccgacgatgggtagccgagctgagaggctgatcggccacactggaactgagacacggtccagactcctacgggaggcagcagtggggaatattgggcaatgggcgcaagcctgacccagcaacgccgcgtgagggaagaaggttttcggattgtaaacctctgtcgcaggggacgaaggaagtgacggtaccctgtaagaaagccccggctaactacgtgccagcagccgcggtaatacgtagggggcgagcgttgtccggaattactgggcgtaaagggagcgtaggcggtcgattaagttagatgtgaaacccccgggcttaacttggggactgcatctaatactggttgacttagagtacaggagagggaagcggaattcctagtgtagcggtgaaatgcgtagatattaggaggaacaccagtggcgaaggcggctttctggactgacactgacgctgaggctcgaaagcgtggggagcaaacaggattagataccctggtagtccacgctgtaaacgatgaatactaggtgtagggggtatcaactccctctgtgccgcagcaaacgcaataagtattccgcctggggagtacggccgcaaggttgaaactcaaaggaattgacgggggcccgcacaagcagcggagcatgtggtttaattcgacgcaacgcgaagaaccttaccaaggcttgacatctacttaaagtcatggaaacatgatgtctcttcggaggaagtaagacaggtggtgcatggttgtcgtcagctcgtgtcgtgagatgttgggttaagtcccgcaacgagcgcaacccctgttgccagttaccagcacgtaaaggtggggactctggtaagactgccggggacaactcggaggaaggtggggacgacgtcaaatcatcatgccccttatgtcttgggctacacacgtgctacaatggctgtaacaaagggaagcgaccccgtaaggggaagcggatctcagaaaagcagtctcagttcggattgtgggctgcaacccgcccacatgaagttggagttgctagtaatcgcggatcagcatgccgcggtgaatacgttcccgggccttgtacacaccgcccgtcacaccatgggagttgagagcgcccgaagccggtatcctaacctgcaaaggagggag
